United States Patent Application Publication US 2026/0242478 A1, published August 20, 2026 (application 19/659,963).

The application's sequence listing, which the Patent Office published only in electronic form, follows.

SEQUENCE LISTING (4470 sequences)

SEQ ID NO: 1 - protein, 8 aa, synthetic construct
GYTFTSYY

SEQ ID NO: 2 - protein, 8 aa, synthetic construct
IYPGNVNT

SEQ ID NO: 3 - protein, 13 aa, synthetic construct
TRSHYGLDWNFDV

SEQ ID NO: 4 - protein, 6 aa, synthetic construct
QNIYVW

SEQ ID NO: 5 - skipped

SEQ ID NO: 6 - protein, 9 aa, synthetic construct
QQGQTYPYT

SEQ ID NO: 7 - protein, 120 aa, synthetic construct
QVQLVQSGAEVKKPGASVKVSCKASGYTFTSYYIHWVRQAPGQGLEWIGSIYPGNVNTNYNEKFKDRATLTVDTSISTAYMELSRLRSDDTAVYFCTRSHYGLDWNFDVWGQGTTVTVSS

SEQ ID NO: 8 - protein, 107 aa, synthetic construct
DIQMTQSPSSLSASVGDRVTITCHASQNIYVWLNWYQQKPGKAPKLLIYKASNLHTGVPSRFSGSGSGTDFTLTISSLQPEDFATYYCQQGQTYPYTFGGGTKVEIK

SEQ ID NO: 9 - protein, 242 aa, synthetic construct
QVQLVQSGAEVKKPGASVKVSCKASGYTFTSYYIHWVRQAPGQGLEWIGSIYPGNVNTNYNEKFKDRATLTVDTSISTAYMELSRLRSDDTAVYFCTRSHYGLDWNFDVWGQGTTVTVSSGGGGSGGGGSGGGGSDIQMTQSPSSLSASVGDRVTITCHASQNIYVWLNWYQQKPGKAPKLLIYKASNLHTGVPSRFSGSGSGTDFTLTISSLQPEDFATYYCQQGQTYPYTFGGGTKVEIK

SEQ ID NO: 10 - protein, 242 aa, synthetic construct
QVQLVQSGAEVKKPGASVKVSCKASGYTFTSYYIHWVRQAPGQCLEWIGSIYPGNVNTNYNEKFKDRATLTVDTSISTAYMELSRLRSDDTAVYFCTRSHYGLDWNFDVWGQGTTVTVSSGGGGSGGGGSGGGGSDIQMTQSPSSLSASVGDRVTITCHASQNIYVWLNWYQQKPGKAPKLLIYKASNLHTGVPSRFSGSGSGTDFTLTISSLQPEDFATYYCQQGQTYPYTFGCGTKVEIK

SEQ ID NO: 11 - protein, 242 aa, synthetic construct
DIQMTQSPSSLSASVGDRVTITCHASQNIYVWLNWYQQKPGKAPKLLIYKASNLHTGVPSRFSGSGSGTDFTLTISSLQPEDFATYYCQQGQTYPYTFGGGTKVEIKGGGGSGGGGSGGGGSQVQLVQSGAEVKKPGASVKVSCKASGYTFTSYYIHWVRQAPGQGLEWIGSIYPGNVNTNYNEKFKDRATLTVDTSISTAYMELSRLRSDDTAVYFCTRSHYGLDWNFDVWGQGTTVTVSS

SEQ ID NO: 12 - protein, 242 aa, synthetic construct
DIQMTQSPSSLSASVGDRVTITCHASQNIYVWLNWYQQKPGKAPKLLIYKASNLHTGVPSRFSGSGSGTDFTLTISSLQPEDFATYYCQQGQTYPYTFGCGTKVEIKGGGGSGGGGSGGGGSQVQLVQSGAEVKKPGASVKVSCKASGYTFTSYYIHWVRQAPGQCLEWIGSIYPGNVNTNYNEKFKDRATLTVDTSISTAYMELSRLRSDDTAVYFCTRSHYGLDWNFDVWGQGTTVTVSS

SEQ ID NO: 13 - protein, 8 aa, synthetic construct
GFAFSRYG

SEQ ID NO: 14 - protein, 8 aa, synthetic construct
IWYDGSNK

SEQ ID NO: 15 - protein, 16 aa, synthetic construct
ARGGDFLYYYYYGMDV

SEQ ID NO: 16 - protein, 6 aa, synthetic construct
QGISNY

SEQ ID NO: 17 - skipped

SEQ ID NO: 18 - protein, 9 aa, synthetic construct
QNYNSAPFT

SEQ ID NO: 19 - protein, 214 aa, synthetic construct
DIQMTQSPSSLSASVGDRVTITCRASQGISNYLAWYQQKTGKVPKFLIYEASTLQSGVPSRFSGGGSGTDFTLTISSLQPEDVATYYCQNYNSAPFTFGPGTKVDIKRTVAAPSVFIFPPSDEQLKSGTASVVCLLNNFYPREAKVQWKVDNALQSGNSQESVTEQDSKDSTYSLSSTLTLSKADYEKHKVYACEVTHQGLSSPVTKSFNRGEC

SEQ ID NO: 20 - protein, 226 aa, synthetic construct
QVQLVESGGGVVQPGRSLRLSCAASGFAFSRYGMHWVRQAPGKGLEWVAVIWYDGSNKYYADSVKGRFTISRDNSKNTQYLQMNSLRAEDTAVYYCARGGDFLYYYYYGMDVWGQGTTVTVSSASTKGPSVFPLAPSSKSTSGGTAALGCLVKDYFPEPVTVSWNSGALTSGVHTFPAVLQSSGLYSLSSVVTVPSSSLGTQTYICNVNHKPSNTKVDKKVEPKSC

SEQ ID NO: 21 - protein, 15 aa, synthetic construct
GGGGSGGGGSGGGGS

SEQ ID NO: 22 - protein, 5 aa, synthetic construct
GGGGS

SEQ ID NO: 23 - protein, 214 aa, synthetic construct; identical to SEQ ID NO: 19

SEQ ID NO: 24 - protein, 473 aa, synthetic construct
QVQLVQSGAEVKKPGASVKVSCKASGYTFTSYYIHWVRQAPGQGLEWIGSIYPGNVNTNYNEKFKDRATLTVDTSISTAYMELSRLRSDDTAVYFCTRSHYGLDWNFDVWGQGTTVTVSSGGGGSGGGGSGGGGSDIQMTQSPSSLSASVGDRVTITCHASQNIYVWLNWYQQKPGKAPKLLIYKASNLHTGVPSRFSGSGSGTDFTLTISSLQPEDFATYYCQQGQTYPYTFGGGTKVEIKGGGGSQVQLVESGGGVVQPGRSLRLSCAASGFAFSRYGMHWVRQAPGKGLEWVAVIWYDGSNKYYADSVKGRFTISRDNSKNTQYLQMNSLRAEDTAVYYCARGGDFLYYYYYGMDVWGQGTTVTVSSASTKGPSVFPLAPSSKSTSGGTAALGCLVKDYFPEPVTVSWNSGALTSGVHTFPAVLQSSGLYSLSSVVTVPSSSLGTQTYICNVNHKPSNTKVDKKVEPKSC

SEQ ID NO: 25 - protein, 461 aa, synthetic construct
QVQLVQSGAEVKKPGASVKVSCKASGYTFTSYYIHWVRQAPGQGLEWIGSIYPGNVNTNYNEKFKDRATLTVDTSISTAYMELSRLRSDDTAVYFCTRSHYGLDWNFDVWGQGTTVTVSSGGGGSGGGGSGGGGSDIQMTQSPSSLSASVGDRVTITCHASQNIYVWLNWYQQKPGKAPKLLIYKASNLHTGVPSRFSGSGSGTDFTLTISSLQPEDFATYYCQQGQTYPYTFGGGTKVEIKGGGGSDIQMTQSPSSLSASVGDRVTITCRASQGISNYLAWYQQKTGKVPKFLIYEASTLQSGVPSRFSGGGSGTDFTLTISSLQPEDVATYYCQNYNSAPFTFGPGTKVDIKRTVAAPSVFIFPPSDEQLKSGTASVVCLLNNFYPREAKVQWKVDNALQSGNSQESVTEQDSKDSTYSLSSTLTLSKADYEKHKVYACEVTHQGLSSPVTKSFNRGEC

SEQ ID NO: 26 - protein, 226 aa, synthetic construct; identical to SEQ ID NO: 20

SEQ ID NO: 27 - protein, 461 aa, synthetic construct
QVQLVQSGAEVKKPGASVKVSCKASGYTFTSYYIHWVRQAPGQCLEWIGSIYPGNVNTNYNEKFKDRATLTVDTSISTAYMELSRLRSDDTAVYFCTRSHYGLDWNFDVWGQGTTVTVSSGGGGSGGGGSGGGGSDIQMTQSPSSLSASVGDRVTITCHASQNIYVWLNWYQQKPGKAPKLLIYKASNLHTGVPSRFSGSGSGTDFTLTISSLQPEDFATYYCQQGQTYPYTFGCGTKVEIKGGGGSDIQMTQSPSSLSASVGDRVTITCRASQGISNYLAWYQQKTGKVPKFLIYEASTLQSGVPSRFSGGGSGTDFTLTISSLQPEDVATYYCQNYNSAPFTFGPGTKVDIKRTVAAPSVFIFPPSDEQLKSGTASVVCLLNNFYPREAKVQWKVDNALQSGNSQESVTEQDSKDSTYSLSSTLTLSKADYEKHKVYACEVTHQGLSSPVTKSFNRGEC

SEQ ID NO: 28 - protein, 226 aa, synthetic construct; identical to SEQ ID NO: 20

SEQ ID NO: 29 - protein, 461 aa, synthetic construct
DIQMTQSPSSLSASVGDRVTITCHASQNIYVWLNWYQQKPGKAPKLLIYKASNLHTGVPSRFSGSGSGTDFTLTISSLQPEDFATYYCQQGQTYPYTFGGGTKVEIKGGGGSGGGGSGGGGSQVQLVQSGAEVKKPGASVKVSCKASGYTFTSYYIHWVRQAPGQGLEWIGSIYPGNVNTNYNEKFKDRATLTVDTSISTAYMELSRLRSDDTAVYFCTRSHYGLDWNFDVWGQGTTVTVSSGGGGSDIQMTQSPSSLSASVGDRVTITCRASQGISNYLAWYQQKTGKVPKFLIYEASTLQSGVPSRFSGGGSGTDFTLTISSLQPEDVATYYCQNYNSAPFTFGPGTKVDIKRTVAAPSVFIFPPSDEQLKSGTASVVCLLNNFYPREAKVQWKVDNALQSGNSQESVTEQDSKDSTYSLSSTLTLSKADYEKHKVYACEVTHQGLSSPVTKSFNRGEC

SEQ ID NO: 30 - protein, 226 aa, synthetic construct; identical to SEQ ID NO: 20

SEQ ID NO: 31 - protein, 461 aa, synthetic construct
DIQMTQSPSSLSASVGDRVTITCHASQNIYVWLNWYQQKPGKAPKLLIYKASNLHTGVPSRFSGSGSGTDFTLTISSLQPEDFATYYCQQGQTYPYTFGCGTKVEIKGGGGSGGGGSGGGGSQVQLVQSGAEVKKPGASVKVSCKASGYTFTSYYIHWVRQAPGQCLEWIGSIYPGNVNTNYNEKFKDRATLTVDTSISTAYMELSRLRSDDTAVYFCTRSHYGLDWNFDVWGQGTTVTVSSGGGGSDIQMTQSPSSLSASVGDRVTITCRASQGISNYLAWYQQKTGKVPKFLIYEASTLQSGVPSRFSGGGSGTDFTLTISSLQPEDVATYYCQNYNSAPFTFGPGTKVDIKRTVAAPSVFIFPPSDEQLKSGTASVVCLLNNFYPREAKVQWKVDNALQSGNSQESVTEQDSKDSTYSLSSTLTLSKADYEKHKVYACEVTHQGLSSPVTKSFNRGEC

SEQ ID NO: 32 - protein, 226 aa, synthetic construct; identical to SEQ ID NO: 20

SEQ ID NO: 33 - protein, 14 aa, synthetic construct
YWYCSPSIVRCVLV

SEQ ID NO: 34 - protein, 14 aa, synthetic construct
LICKSGSILILCAQ

SEQ ID NO: 35 - protein, 14 aa, synthetic construct
SPCGLFQWMEICEF

SEQ ID NO: 36 - protein, 14 aa, synthetic construct
SFCGLFLDLWICEF

SEQ ID NO: 37 - protein, 14 aa, synthetic construct
DNCYVIWGFEWQCR

SEQ ID NO: 38 - protein, 14 aa, synthetic construct
VNCMRVHRTLTWCV

SEQ ID NO: 39 - protein, 14 aa, synthetic construct
FCTPREWSFLNFVC

SEQ ID NO: 40 - protein, 14 aa, synthetic construct
CFAYLWIDSWIRVC

SEQ ID NO: 41 - protein, 14 aa, synthetic construct
MDWCPRERWVDCFF

SEQ ID NO: 42 - protein, 14 aa, synthetic construct
GQHCATSMWRYCMF

SEQ ID NO: 43 - protein, 14 aa, synthetic construct
WICDKSGSIMLCRA

SEQ ID NO: 44 - protein, 14 aa, synthetic construct
GYCHYWGDMVMWCG

SEQ ID NO: 45 - protein, 14 aa, synthetic construct
DNCHYIWGFEWQCG

SEQ ID NO: 46 - protein, 14 aa, synthetic construct
IDCIMVHMVKPWCF

SEQ ID NO: 47 - protein, 14 aa, synthetic construct
NCQPWYWNMFAFGC

SEQ ID NO: 48 - protein, 14 aa, synthetic construct
NCQPWYWNMIAFGC

SEQ ID NO: 49 - protein, 14 aa, synthetic construct
GCFTWSQRTFPFTC

SEQ ID NO: 50 - protein, 14 aa, synthetic construct
CFYAEYYDQVYSFC

SEQ ID NO: 51 - protein, 14 aa, synthetic construct
ADWCPRERWVDCFF

SEQ ID NO: 52 - protein, 14 aa, synthetic construct
MAWCPRERWVDCFF

SEQ ID NO: 53 - protein, 14 aa, synthetic construct
MDACPRERWVDCFF

SEQ ID NO: 54 - protein, 14 aa, synthetic construct
MDWCARERWVDCFF

SEQ ID NO: 55 - protein, 14 aa, synthetic construct
MDWCPAERWVDCFF

SEQ ID NO: 56 - protein, 14 aa, synthetic construct
MDWCPRARWVDCFF

SEQ ID NO: 57 - protein, 14 aa, synthetic construct
MDWCPREAWVDCFF

SEQ ID NO: 58 - protein, 14 aa, synthetic construct
MDWCPRERAVDCFF

SEQ ID NO: 59 - protein, 14 aa, synthetic construct
MDWCPRERWADCFF

SEQ ID NO: 60 - protein, 14 aa, synthetic construct
MDWCPRERWVACFF

SEQ ID NO: 61 - protein, 14 aa, synthetic construct
MDWCPRERWVDCAF

SEQ ID NO: 62 - protein, 14 aa, synthetic construct
MDWCPRERWVDCFA

SEQ ID NO: 63 - protein, 14 aa, synthetic construct
MDWCPIDLWNECFF

SEQ ID NO: 64 - protein, 14 aa, synthetic construct
MDWCPIHLWHVCFN

SEQ ID NO: 65 - protein, 14 aa, synthetic construct
MDWCPIYLWSECFN

SEQ ID NO: 66 - protein, 14 aa, synthetic construct
MNWCPKDIWYLCFN

SEQ ID NO: 67 - protein, 14 aa, synthetic construct
MDWCPLHMWHECFS

SEQ ID NO: 68 - protein, 14 aa, synthetic construct
MDWCPLYLWNECFN

SEQ ID NO: 69 - protein, 14 aa, synthetic construct
MDWCPRDLWDLCFA

SEQ ID NO: 70 - protein, 14 aa, synthetic construct
MDWCPRDLWHECFA

SEQ ID NO: 71 - protein, 14 aa, synthetic construct
MDWCPRDLWHLCFS

SEQ ID NO: 72 - protein, 14 aa, synthetic construct
MDWCPRDLWSECFF

SEQ ID NO: 73 - protein, 14 aa, synthetic construct
MDWCPRDLWVHCFA

SEQ ID NO: 74 - protein, 14 aa, synthetic construct
MDWCPRDMWDECFA

SEQ ID NO: 75 - protein, 14 aa, synthetic construct
MDWCPRDMWSECFA

SEQ ID NO: 76 - protein, 14 aa, synthetic construct
MDWCPRDMWSVCFS

SEQ ID NO: 77 - protein, 14 aa, synthetic construct
MDWCPRFMWDECFN

SEQ ID NO: 78 - protein, 14 aa, synthetic construct
MDWCPRHMWNYCFA

SEQ ID NO: 79 - protein, 14 aa, synthetic construct
MDWCPRSLWHECFA

SEQ ID NO: 80 - protein, 14 aa, synthetic construct
MDWCPRYLWHVCFA

SEQ ID NO: 81 - protein, 14 aa, synthetic construct
MHWCPVDLWYLCYN

SEQ ID NO: 82 - protein, 14 aa, synthetic construct
MDWCPVHLWSVCFA

SEQ ID NO: 83 - skipped

SEQ ID NO: 84 - protein, 14 aa, synthetic construct
ADWCPRDLWVHCFA

SEQ ID NO: 85 - protein, 14 aa, synthetic construct
RDWCPRDLWVHCFA

SEQ ID NO: 86 - protein, 14 aa, synthetic construct
NDWCPRDLWVHCFA

SEQ ID NO: 87 - protein, 14 aa, synthetic construct
DDWCPRDLWVHCFA

SEQ ID NO: 88 - protein, 14 aa, synthetic construct
QDWCPRDLWVHCFA

SEQ ID NO: 89 - protein, 14 aa, synthetic construct
EDWCPRDLWVHCFA

SEQ ID NO: 90 - protein, 14 aa, synthetic construct
GDWCPRDLWVHCFA

SEQ ID NO: 91 - protein, 14 aa, synthetic construct
HDWCPRDLWVHCFA

SEQ ID NO: 92 - protein, 14 aa, synthetic construct
IDWCPRDLWVHCFA

SEQ ID NO: 93 - protein, 14 aa, synthetic construct
LDWCPRDLWVHCFA

SEQ ID NO: 94 - protein, 14 aa, synthetic construct
KDWCPRDLWVHCFA

SEQ ID NO: 95 - protein, 14 aa, synthetic construct
FDWCPRDLWVHCFA

SEQ ID NO: 96 - protein, 14 aa, synthetic construct
PDWCPRDLWVHCFA

SEQ ID NO: 97 - protein, 14 aa, synthetic construct
SDWCPRDLWVHCFA

SEQ ID NO: 98 - protein, 14 aa, synthetic construct
TDWCPRDLWVHCFA

SEQ ID NO: 99 - protein, 14 aa, synthetic construct
WDWCPRDLWVHCFA

SEQ ID NO: 100 - protein, 14 aa, synthetic construct
YDWCPRDLWVHCFA

SEQ ID NO: 101 - protein, 14 aa, synthetic construct
VDWCPRDLWVHCFA

SEQ ID NO: 102 - protein, 14 aa, synthetic construct
LDWCPRHLWALCFN

SEQ ID NO: 103 - protein, 14 aa, synthetic construct
IDWCPRYLWDECYN

SEQ ID NO: 104 - protein, 14 aa, synthetic construct
IDWCPLHLWHECYH

SEQ ID NO: 105 - protein, 14 aa, synthetic construct
VPWCQIISGLECLT

SEQ ID NO: 106 - protein, 14 aa, synthetic construct
IYWCPIDRWNDCYN

SEQ ID NO: 107 - protein, 15 aa, synthetic construct
GGGGSGGGGSGGGGS

SEQ ID NO: 108 - protein, 5 aa, synthetic construct
GGGGS

SEQ ID NO: 109 - protein, 9 aa, synthetic construct
GGGGSGGGS

SEQ ID NO: 110 - protein, 28 aa, synthetic construct
GGGGSGGGLSGRSDAGSPLGLAGSGGGS

SEQ ID NO: 111 - protein, 18 aa, synthetic construct
GGGGSLSGRSDNHGSSGT

SEQ ID NO: 112 - protein, 26 aa, synthetic construct
GGGGSSGGSGGSGLSGRSDNHGSSGT

SEQ ID NO: 113 - protein, 8 aa, synthetic construct
ASGRSDNH

SEQ ID NO: 114 - protein, 8 aa, synthetic construct
LAGRSDNH

SEQ ID NO: 115 - protein, 13 aa, synthetic construct
ISSGLASGRSDNH

SEQ ID NO: 116 - protein, 13 aa, synthetic construct
ISSGLLAGRSDNH

SEQ ID NO: 117 - protein, 8 aa, synthetic construct
LSGRSDNH

SEQ ID NO: 118 - protein, 13 aa, synthetic construct
ISSGLLSGRSDNP

SEQ ID NO: 119 - protein, 13 aa, synthetic construct
ISSGLLSGRSDNH

SEQ ID NO: 120 - protein, 16 aa, synthetic construct
LSGRSDNHSPLGLAGS

SEQ ID NO: 121 - protein, 16 aa, synthetic construct
SPLGLAGSLSGRSDNH

SEQ ID NO: 122 - protein, 12 aa, synthetic construct
SPLGLSGRSDNH

SEQ ID NO: 123 - protein, 16 aa, synthetic construct
LAGRSDNHSPLGLAGS

SEQ ID NO: 124 - protein, 16 aa, synthetic construct
LSGRSDNHVPLSLKMG

SEQ ID NO: 125 - protein, 16 aa, synthetic construct
LSGRSDNHVPLSLSMG

SEQ ID NO: 126 - protein, 31 aa, synthetic construct
GSSGGSGGSGGSGISSGLLSGRSDNHGSSGT

SEQ ID NO: 127 - protein, 28 aa, synthetic construct
GSSGGSGGSGGISSGLLSGRSDNHGGGS

SEQ ID NO: 128 - protein, 8 aa, synthetic construct
ASGRSDNH

SEQ ID NO: 129 - protein, 8 aa, synthetic construct
LAGRSDNH

SEQ ID NO: 130 - protein, 13 aa, synthetic construct
ISSGLASGRSDNH

SEQ ID NO: 131 - protein, 8 aa, synthetic construct
LSGRSDAG

SEQ ID NO: 132 - protein, 13 aa, synthetic construct
ISSGLLSGRSDAG

SEQ ID NO: 133 - protein, 18 aa, synthetic construct
AAGLLAPPGGLSGRSDAG

SEQ ID NO: 134 - protein, 12 aa, synthetic construct
SPLGLSGRSDAG

SEQ ID NO: 135 - protein, 15 aa, synthetic construct
LSGRSDAGSPLGLAG

SEQ ID NO: 136 - protein, 16 aa, synthetic construct
LSGRSDAGSPLGLAGS

SEQ ID NO: 137 - protein, 28 aa, synthetic construct
GGGGSGGGSGGGGSGGASSGAGGSGGGS

SEQ ID NO: 138 - protein, 8 aa, synthetic construct
GSTFYTAV

SEQ ID NO: 139 - protein, 8 aa, synthetic construct
IRWTALTT

SEQ ID NO: 140 - protein, 17 aa, synthetic construct
AARGTLGLFTTADSYDY

SEQ ID NO: 141 - protein, 124 aa, synthetic construct
EVQLVESGGGLVQPGGSLRLSCAASGSTFYTAVMGWVRQAPGKGLEWVAAIRWTALTTSYADSVKGRFTISRDGAKTTLYLQMNSLRPEDTAVYYCAARGTLGLFTTADSYDYWGQGTLVTVSS

SEQ ID NO: 142 - protein, 8 aa, synthetic construct
GFTFSKFG

SEQ ID NO: 143 - protein, 8 aa, synthetic construct
ISGSGRDT

SEQ ID NO: 144 - protein, 8 aa, synthetic construct
TIGGSLSV

SEQ ID NO: 145 - protein, 115 aa, synthetic construct
EVQLVESGGGLVQPGNSLRLSCAASGFTFSKFGMSWVRQAPGKGLEWVSSISGSGRDTLYADSVKGRFTISRDNAKTTLYLQMNSLRPEDTAVYYCTIGGSLSVSSQGTLVTVSS

SEQ ID NO: 146 - protein, 124 aa, synthetic construct
EVQLVESGGGLVQPGGSLRLSCAASGSTFYTAVMGWVRQAPGKGLEWVAAIRWTALTTSYADSVKGRFTISRDNAKTTLYLQMNSLRPEDTAVYYCAARGTLGLFTTADAYDYWGQGTLVTVSS

SEQ ID NO: 147 - protein, 214 aa, synthetic construct; identical to SEQ ID NO: 19

SEQ ID NO: 148 - protein, 650 aa, synthetic construct
EVQLVESGGGLVQPGGSLRLSCAASGSTFYTAVMGWVRQAPGKGLEWVAAIRWTALTTSYADSVKGRFTISRDNAKTTLYLQMNSLRPEDTAVYYCAARGTLGLFTTADAYDYWGQGTLVTVSSGGGGSGGGSGGMDWCPRDLWVHCFAGSSGGSGGLSGRSDAGSPLGLAGSGGGSQVQLVQSGAEVKKPGASVKVSCKASGYTFTSYYIHWVRQAPGQGLEWIGSIYPGNVNTNYNEKFKDRATLTVDTSISTAYMELSRLRSDDTAVYFCTRSHYGLDWNFDVWGQGTTVTVSSGGGGSGGGGSGGGGSDIQMTQSPSSLSASVGDRVTITCHASQNIYVWLNWYQQKPGKAPKLLIYKASNLHTGVPSRFSGSGSGTDFTLTISSLQPEDFATYYCQQGQTYPYTFGGGTKVEIKGGGGSQVQLVESGGGVVQPGRSLRLSCAASGFAFSRYGMHWVRQAPGKGLEWVAVIWYDGSNKYYADSVKGRFTISRDNSKNTQYLQMNSLRAEDTAVYYCARGGDFLYYYYYGMDVWGQGTTVTVSSASTKGPSVFPLAPSSKSTSGGTAALGCLVKDYFPEPVTVSWNSGALTSGVHTFPAVLQSSGLYSLSSVVTVPSSSLGTQTYICNVNHKPSNTKVDKKVEPKSC

SEQ ID NO: 149 - protein, 638 aa, synthetic construct
EVQLVESGGGLVQPGGSLRLSCAASGSTFYTAVMGWVRQAPGKGLEWVAAIRWTALTTSYADSVKGRFTISRDNAKTTLYLQMNSLRPEDTAVYYCAARGTLGLFTTADAYDYWGQGTLVTVSSGGGGSGGGSGGMDWCPRDLWVHCFAGSSGGSGGLSGRSDAGSPLGLAGSGGGSQVQLVQSGAEVKKPGASVKVSCKASGYTFTSYYIHWVRQAPGQGLEWIGSIYPGNVNTNYNEKFKDRATLTVDTSISTAYMELSRLRSDDTAVYFCTRSHYGLDWNFDVWGQGTTVTVSSGGGGSGGGGSGGGGSDIQMTQSPSSLSASVGDRVTITCHASQNIYVWLNWYQQKPGKAPKLLIYKASNLHTGVPSRFSGSGSGTDFTLTISSLQPEDFATYYCQQGQTYPYTFGGGTKVEIKGGGGSDIQMTQSPSSLSASVGDRVTITCRASQGISNYLAWYQQKTGKVPKFLIYEASTLQSGVPSRFSGGGSGTDFTLTISSLQPEDVATYYCQNYNSAPFTFGPGTKVDIKRTVAAPSVFIFPPSDEQLKSGTASVVCLLNNFYPREAKVQWKVDNALQSGNSQESVTEQDSKDSTYSLSSTLTLSKADYEKHKVYACEVTHQGLSSPVTKSFNRGEC

SEQ ID NO: 150 - protein, 226 aa, synthetic construct; identical to SEQ ID NO: 20

SEQ ID NO: 151 - protein, 638 aa, synthetic construct
EVQLVESGGGLVQPGGSLRLSCAASGSTFYTAVMGWVRQAPGKGLEWVAAIRWTALTTSYADSVKGRFTISRDNAKTTLYLQMNSLRPEDTAVYYCAARGTLGLFTTADAYDYWGQGTLVTVSSGGGGSGGGSGGMDWCPRDLWVHCFAGSSGGSGGLSGRSDAGSPLGLAGSGGGSQVQLVQSGAEVKKPGASVKVSCKASGYTFTSYYIHWVRQAPGQCLEWIGSIYPGNVNTNYNEKFKDRATLTVDTSISTAYMELSRLRSDDTAVYFCTRSHYGLDWNFDVWGQGTTVTVSSGGGGSGGGGSGGGGSDIQMTQSPSSLSASVGDRVTITCHASQNIYVWLNWYQQKPGKAPKLLIYKASNLHTGVPSRFSGSGSGTDFTLTISSLQPEDFATYYCQQGQTYPYTFGCGTKVEIKGGGGSDIQMTQSPSSLSASVGDRVTITCRASQGISNYLAWYQQKTGKVPKFLIYEASTLQSGVPSRFSGGGSGTDFTLTISSLQPEDVATYYCQNYNSAPFTFGPGTKVDIKRTVAAPSVFIFPPSDEQLKSGTASVVCLLNNFYPREAKVQWKVDNALQSGNSQESVTEQDSKDSTYSLSSTLTLSKADYEKHKVYACEVTHQGLSSPVTKSFNRGEC

SEQ ID NO: 152 - protein, 226 aa, synthetic construct; identical to SEQ ID NO: 20

SEQ ID NO: 153 - protein, 638 aa, synthetic construct
EVQLVESGGGLVQPGGSLRLSCAASGSTFYTAVMGWVRQAPGKGLEWVAAIRWTALTTSYADSVKGRFTISRDNAKTTLYLQMNSLRPEDTAVYYCAARGTLGLFTTADAYDYWGQGTLVTVSSGGGGSGGGSGGMDWCPRDLWVHCFAGGGGSGGGSGGGGSGGASSGAGGSGGGSQVQLVQSGAEVKKPGASVKVSCKASGYTFTSYYIHWVRQAPGQCLEWIGSIYPGNVNTNYNEKFKDRATLTVDTSISTAYMELSRLRSDDTAVYFCTRSHYGLDWNFDVWGQGTTVTVSSGGGGSGGGGSGGGGSDIQMTQSPSSLSASVGDRVTITCHASQNIYVWLNWYQQKPGKAPKLLIYKASNLHTGVPSRFSGSGSGTDFTLTISSLQPEDFATYYCQQGQTYPYTFGCGTKVEIKGGGGSDIQMTQSPSSLSASVGDRVTITCRASQGISNYLAWYQQKTGKVPKFLIYEASTLQSGVPSRFSGGGSGTDFTLTISSLQPEDVATYYCQNYNSAPFTFGPGTKVDIKRTVAAPSVFIFPPSDEQLKSGTASVVCLLNNFYPREAKVQWKVDNALQSGNSQESVTEQDSKDSTYSLSSTLTLSKADYEKHKVYACEVTHQGLSSPVTKSFNRGEC

SEQ ID NO: 154 - protein, 226 aa, synthetic construct; identical to SEQ ID NO: 20

SEQ ID NO: 155 - protein, 638 aa, synthetic construct
EVQLVESGGGLVQPGGSLRLSCAASGSTFYTAVMGWVRQAPGKGLEWVAAIRWTALTTSYADSVKGRFTISRDGAKTTLYLQMNSLRPEDTAVYYCAARGTLGLFTTADSYDYWGQGTLVTVSSGGGGSGGGSGGMDWCPRDLWVHCFAGSSGGSGGLSGRSDAGSPLGLAGSGGGSQVQLVQSGAEVKKPGASVKVSCKASGYTFTSYYIHWVRQAPGQCLEWIGSIYPGNVNTNYNEKFKDRATLTVDTSISTAYMELSRLRSDDTAVYFCTRSHYGLDWNFDVWGQGTTVTVSSGGGGSGGGGSGGGGSDIQMTQSPSSLSASVGDRVTITCHASQNIYVWLNWYQQKPGKAPKLLIYKASNLHTGVPSRFSGSGSGTDFTLTISSLQPEDFATYYCQQGQTYPYTFGCGTKVEIKGGGGSDIQMTQSPSSLSASVGDRVTITCRASQGISNYLAWYQQKTGKVPKFLIYEASTLQSGVPSRFSGGGSGTDFTLTISSLQPEDVATYYCQNYNSAPFTFGPGTKVDIKRTVAAPSVFIFPPSDEQLKSGTASVVCLLNNFYPREAKVQWKVDNALQSGNSQESVTEQDSKDSTYSLSSTLTLSKADYEKHKVYACEVTHQGLSSPVTKSFNRGEC

SEQ ID NO: 156 - protein, 226 aa, synthetic construct; identical to SEQ ID NO: 20

SEQ ID NO: 157 - protein, 638 aa, synthetic construct
EVQLVESGGGLVQPGGSLRLSCAASGSTFYTAVMGWVRQAPGKGLEWVAAIRWTALTTSYADSVKGRFTISRDGAKTTLYLQMNSLRPEDTAVYYCAARGTLGLFTTADSYDYWGQGTLVTVSSGGGGSGGGSGGMDWCPRDLWVHCFAGGGGSGGGSGGGGSGGASSGAGGSGGGSQVQLVQSGAEVKKPGASVKVSCKASGYTFTSYYIHWVRQAPGQCLEWIGSIYPGNVNTNYNEKFKDRATLTVDTSISTAYMELSRLRSDDTAVYFCTRSHYGLDWNFDVWGQGTTVTVSSGGGGSGGGGSGGGGSDIQMTQSPSSLSASVGDRVTITCHASQNIYVWLNWYQQKPGKAPKLLIYKASNLHTGVPSRFSGSGSGTDFTLTISSLQPEDFATYYCQQGQTYPYTFGCGTKVEIKGGGGSDIQMTQSPSSLSASVGDRVTITCRASQGISNYLAWYQQKTGKVPKFLIYEASTLQSGVPSRFSGGGSGTDFTLTISSLQPEDVATYYCQNYNSAPFTFGPGTKVDIKRTVAAPSVFIFPPSDEQLKSGTASVVCLLNNFYPREAKVQWKVDNALQSGNSQESVTEQDSKDSTYSLSSTLTLSKADYEKHKVYACEVTHQGLSSPVTKSFNRGEC

SEQ ID NO: 158 - protein, 226 aa, synthetic construct; identical to SEQ ID NO: 20

SEQ ID NO: 159 - protein, 638 aa, synthetic construct
EVQLVESGGGLVQPGGSLRLSCAASGSTFYTAVMGWVRQAPGKGLEWVAAIRWTALTTSYADSVKGRFTISRDGAKTTLYLQMNSLRPEDTAVYYCAARGTLGLFTTADSYDYWGQGTLVTVSSGGGGSGGGSGGMDWCPRDLWVHCFAGSSGGSGGLSGRSDAGSPLGLAGSGGGSQVQLVQSGAEVKKPGASVKVSCKASGYTFTSYYIHWVRQAPGQGLEWIGSIYPGNVNTNYNEKFKDRATLTVDTSISTAYMELSRLRSDDTAVYFCTRSHYGLDWNFDVWGQGTTVTVSSGGGGSGGGGSGGGGSDIQMTQSPSSLSASVGDRVTITCHASQNIYVWLNWYQQKPGKAPKLLIYKASNLHTGVPSRFSGSGSGTDFTLTISSLQPEDFATYYCQQGQTYPYTFGGGTKVEIKGGGGSDIQMTQSPSSLSASVGDRVTITCRASQGISNYLAWYQQKTGKVPKFLIYEASTLQSGVPSRFSGGGSGTDFTLTISSLQPEDVATYYCQNYNSAPFTFGPGTKVDIKRTVAAPSVFIFPPSDEQLKSGTASVVCLLNNFYPREAKVQWKVDNALQSGNSQESVTEQDSKDSTYSLSSTLTLSKADYEKHKVYACEVTHQGLSSPVTKSFNRGEC

SEQ ID NO: 160 - protein, 226 aa, synthetic construct; identical to SEQ ID NO: 20

SEQ ID NO: 161 - protein, 638 aa, synthetic construct
EVQLVESGGGLVQPGGSLRLSCAASGSTFYTAVMGWVRQAPGKGLEWVAAIRWTALTTSYADSVKGRFTISRDGAKTTLYLQMNSLRPEDTAVYYCAARGTLGLFTTADSYDYWGQGTLVTVSSGGGGSGGGSGGMDWCPRDLWVHCFAGGGGSGGGSGGGGSGGASSGAGGSGGGSQVQLVQSGAEVKKPGASVKVSCKASGYTFTSYYIHWVRQAPGQGLEWIGSIYPGNVNTNYNEKFKDRATLTVDTSISTAYMELSRLRSDDTAVYFCTRSHYGLDWNFDVWGQGTTVTVSSGGGGSGGGGSGGGGSDIQMTQSPSSLSASVGDRVTITCHASQNIYVWLNWYQQKPGKAPKLLIYKASNLHTGVPSRFSGSGSGTDFTLTISSLQPEDFATYYCQQGQTYPYTFGGGTKVEIKGGGGSDIQMTQSPSSLSASVGDRVTITCRASQGISNYLAWYQQKTGKVPKFLIYEASTLQSGVPSRFSGGGSGTDFTLTISSLQPEDVATYYCQNYNSAPFTFGPGTKVDIKRTVAAPSVFIFPPSDEQLKSGTASVVCLLNNFYPREAKVQWKVDNALQSGNSQESVTEQDSKDSTYSLSSTLTLSKADYEKHKVYACEVTHQGLSSPVTKSFNRGEC

SEQ ID NO: 162 - protein, 226 aa, synthetic construct; identical to SEQ ID NO: 20

SEQ ID NO: 163 - protein, 638 aa, synthetic construct
EVQLVESGGGLVQPGGSLRLSCAASGSTFYTAVMGWVRQAPGKGLEWVAAIRWTALTTSYADSVKGRFTISRDGAKTTLYLQMNSLRPEDTAVYYCAARGTLGLFTTADSYDYWGQGTLVTVSSGGGGSGGGSGGMDWCPRDLWVHCFAGSSGGSGGLSGRSDAGSPLGLAGSGGGSDIQMTQSPSSLSASVGDRVTITCHASQNIYVWLNWYQQKPGKAPKLLIYKASNLHTGVPSRFSGSGSGTDFTLTISSLQPEDFATYYCQQGQTYPYTFGGGTKVEIKGGGGSGGGGSGGGGSQVQLVQSGAEVKKPGASVKVSCKASGYTFTSYYIHWVRQAPGQGLEWIGSIYPGNVNTNYNEKFKDRATLTVDTSISTAYMELSRLRSDDTAVYFCTRSHYGLDWNFDVWGQGTTVTVSSGGGGSDIQMTQSPSSLSASVGDRVTITCRASQGISNYLAWYQQKTGKVPKFLIYEASTLQSGVPSRFSGGGSGTDFTLTISSLQPEDVATYYCQNYNSAPFTFGPGTKVDIKRTVAAPSVFIFPPSDEQLKSGTASVVCLLNNFYPREAKVQWKVDNALQSGNSQESVTEQDSKDSTYSLSSTLTLSKADYEKHKVYACEVTHQGLSSPVTKSFNRGEC

SEQ ID NO: 164 - protein, 226 aa, synthetic construct; identical to SEQ ID NO: 20

SEQ ID NO: 165 - protein, 638 aa, synthetic construct
EVQLVESGGGLVQPGGSLRLSCAASGSTFYTAVMGWVRQAPGKGLEWVAAIRWTALTTSYADSVKGRFTISRDGAKTTLYLQMNSLRPEDTAVYYCAARGTLGLFTTADSYDYWGQGTLVTVSSGGGGSGGGSGGMDWCPRDLWVHCFAGSSGGSGGLSGRSDAGSPLGLAGSGGGSDIQMTQSPSSLSASVGDRVTITCHASQNIYVWLNWYQQKPGKAPKLLIYKASNLHTGVPSRFSGSGSGTDFTLTISSLQPEDFATYYCQQGQTYPYTFGCGTKVEIKGGGGSGGGGSGGGGSQVQLVQSGAEVKKPGASVKVSCKASGYTFTSYYIHWVRQAPGQCLEWIGSIYPGNVNTNYNEKFKDRATLTVDTSISTAYMELSRLRSDDTAVYFCTRSHYGLDWNFDVWGQGTTVTVSSGGGGSDIQMTQSPSSLSASVGDRVTITCRASQGISNYLAWYQQKTGKVPKFLIYEASTLQSGVPSRFSGGGSGTDFTLTISSLQPEDVATYYCQNYNSAPFTFGPGTKVDIKRTVAAPSVFIFPPSDEQLKSGTASVVCLLNNFYPREAKVQWKVDNALQSGNSQESVTEQDSKDSTYSLSSTLTLSKADYEKHKVYACEVTHQGLSSPVTKSFNRGEC

SEQ ID NO: 166 - protein, 226 aa, synthetic construct; identical to SEQ ID NO: 20

SEQ ID NO: 167 - protein, 638 aa, synthetic construct
EVQLVESGGGLVQPGGSLRLSCAASGSTFYTAVMGWVRQAPGKGLEWVAAIRWTALTTSYADSVKGRFTISRDGAKTTLYLQMNSLRPEDTAVYYCAARGTLGLFTTADSYDYWGQGTLVTVSSGGGGSGGGSGGMDWCPRDLWVHCFAGGGGSGGGSGGGGSGGASSGAGGSGGGSDIQMTQSPSSLSASVGDRVTITCHASQNIYVWLNWYQQKPGKAPKLLIYKASNLHTGVPSRFSGSGSGTDFTLTISSLQPEDFATYYCQQGQTYPYTFGGGTKVEIKGGGGSGGGGSGGGGSQVQLVQSGAEVKKPGASVKVSCKASGYTFTSYYIHWVRQAPGQGLEWIGSIYPGNVNTNYNEKFKDRATLTVDTSISTAYMELSRLRSDDTAVYFCTRSHYGLDWNFDVWGQGTTVTVSSGGGGSDIQMTQSPSSLSASVGDRVTITCRASQGISNYLAWYQQKTGKVPKFLIYEASTLQSGVPSRFSGGGSGTDFTLTISSLQPEDVATYYCQNYNSAPFTFGPGTKVDIKRTVAAPSVFIFPPSDEQLKSGTASVVCLLNNFYPREAKVQWKVDNALQSGNSQESVTEQDSKDSTYSLSSTLTLSKADYEKHKVYACEVTHQGLSSPVTKSFNRGEC

SEQ ID NO: 168 - protein, 226 aa, synthetic construct; identical to SEQ ID NO: 20

SEQ ID NO: 169 - protein, 638 aa, synthetic construct
EVQLVESGGGLVQPGGSLRLSCAASGSTFYTAVMGWVRQAPGKGLEWVAAIRWTALTTSYADSVKGRFTISRDGAKTTLYLQMNSLRPEDTAVYYCAARGTLGLFTTADSYDYWGQGTLVTVSSGGGGSGGGSGGMDWCPRDLWVHCFAGGGGSGGGSGGGGSGGASSGAGGSGGGSDIQMTQSPSSLSASVGDRVTITCHASQNIYVWLNWYQQKPGKAPKLLIYKASNLHTGVPSRFSGSGSGTDFTLTISSLQPEDFATYYCQQGQTYPYTFGCGTKVEIKGGGGSGGGGSGGGGSQVQLVQSGAEVKKPGASVKVSCKASGYTFTSYYIHWVRQAPGQCLEWIGSIYPGNVNTNYNEKFKDRATLTVDTSISTAYMELSRLRSDDTAVYFCTRSHYGLDWNFDVWGQGTTVTVSSGGGGSDIQMTQSPSSLSASVGDRVTITCRASQGISNYLAWYQQKTGKVPKFLIYEASTLQSGVPSRFSGGGSGTDFTLTISSLQPEDVATYYCQNYNSAPFTFGPGTKVDIKRTVAAPSVFIFPPSDEQLKSGTASVVCLLNNFYPREAKVQWKVDNALQSGNSQESVTEQDSKDSTYSLSSTLTLSKADYEKHKVYACEVTHQGLSSPVTKSFNRGEC

SEQ ID NO: 170 - protein, 226 aa, synthetic construct; identical to SEQ ID NO: 20

SEQ ID NO: 171 - protein, 638 aa, synthetic construct
EVQLVESGGGLVQPGGSLRLSCAASGSTFYTAVMGWVRQAPGKGLEWVAAIRWTALTTSYADSVKGRFTISRDGAKTTLYLQMNSLRPEDTAVYYCAARGTLGLFTTADSYDYWGQGTLVTVSSGGGGSGGGSGGIDWCPRYLWDECYNAGSGGSGGLSGRSDAGSPLGLAGSGGGSQVQLVQSGAEVKKPGASVKVSCKASGYTFTSYYIHWVRQAPGQGLEWIGSIYPGNVNTNYNEKFKDRATLTVDTSISTAYMELSRLRSDDTAVYFCTRSHYGLDWNFDVWGQGTTVTVSSGGGGSGGGGSGGGGSDIQMTQSPSSLSASVGDRVTITCHASQNIYVWLNWYQQKPGKAPKLLIYKASNLHTGVPSRFSGSGSGTDFTLTISSLQPEDFATYYCQQGQTYPYTFGGGTKVEIKGGGGSDIQMTQSPSSLSASVGDRVTITCRASQGISNYLAWYQQKTGKVPKFLIYEASTLQSGVPSRFSGGGSGTDFTLTISSLQPEDVATYYCQNYNSAPFTFGPGTKVDIKRTVAAPSVFIFPPSDEQLKSGTASVVCLLNNFYPREAKVQWKVDNALQSGNSQESVTEQDSKDSTYSLSSTLTLSKADYEKHKVYACEVTHQGLSSPVTKSFNRGEC

SEQ ID NO: 172 - protein, 226 aa, synthetic construct; identical to SEQ ID NO: 20

SEQ ID NO: 173 - protein, 638 aa, synthetic construct
EVQLVESGGGLVQPGGSLRLSCAASGSTFYTAVMGWVRQAPGKGLEWVAAIRWTALTTSYADSVKGRFTISRDGAKTTLYLQMNSLRPEDTAVYYCAARGTLGLFTTADSYDYWGQGTLVTVSSGGGGSGGGSGGIDWCPRYLWDECYNAGGGSGGGSGGGGSGGASSGAGGSGGGSQVQLVQSGAEVKKPGASVKVSCKASGYTFTSYYIHWVRQAPGQGLEWIGSIYPGNVNTNYNEKFKDRATLTVDTSISTAYMELSRLRSDDTAVYFCTRSHYGLDWNFDVWGQGTTVTVSSGGGGSGGGGSGGGGSDIQMTQSPSSLSASVGDRVTITCHASQNIYVWLNWYQQKPGKAPKLLIYKASNLHTGVPSRFSGSGSGTDFTLTISSLQPEDFATYYCQQGQTYPYTFGGGTKVEIKGGGGSDIQMTQSPSSLSASVGDRVTITCRASQGISNYLAWYQQKTGKVPKFLIYEASTLQSGVPSRFSGGGSGTDFTLTISSLQPEDVATYYCQNYNSAPFTFGPGTKVDIKRTVAAPSVFIFPPSDEQLKSGTASVVCLLNNFYPREAKVQWKVDNALQSGNSQESVTEQDSKDSTYSLSSTLTLSKADYEKHKVYACEVTHQGLSSPVTKSFNRGEC

SEQ ID NO: 174 - protein, 226 aa, synthetic construct; identical to SEQ ID NO: 20

SEQ ID NO: 175 - protein, 638 aa, synthetic construct
EVQLVESGGGLVQPGGSLRLSCAASGSTFYTAVMGWVRQAPGKGLEWVAAIRWTALTTSYADSVKGRFTISRDGAKTTLYLQMNSLRPEDTAVYYCAARGTLGLFTTADSYDYWGQGTLVTVSSGGGGSGGGSGGIDWCPRYLWDECYNAGSGGSGGLSGRSDAGSPLGLAGSGGGSQVQLVQSGAEVKKPGASVKVSCKASGYTFTSYYIHWVRQAPGQCLEWIGSIYPGNVNTNYNEKFKDRATLTVDTSISTAYMELSRLRSDDTAVYFCTRSHYGLDWNFDVWGQGTTVTVSSGGGGSGGGGSGGGGSDIQMTQSPSSLSASVGDRVTITCHASQNIYVWLNWYQQKPGKAPKLLIYKASNLHTGVPSRFSGSGSGTDFTLTISSLQPEDFATYYCQQGQTYPYTFGCGTKVEIKGGGGSDIQMTQSPSSLSASVGDRVTITCRASQGISNYLAWYQQKTGKVPKFLIYEASTLQSGVPSRFSGGGSGTDFTLTISSLQPEDVATYYCQNYNSAPFTFGPGTKVDIKRTVAAPSVFIFPPSDEQLKSGTASVVCLLNNFYPREAKVQWKVDNALQSGNSQESVTEQDSKDSTYSLSSTLTLSKADYEKHKVYACEVTHQGLSSPVTKSFNRGEC

SEQ ID NO: 176 - protein, 226 aa, synthetic construct; identical to SEQ ID NO: 20

SEQ ID NO: 177 - protein, 638 aa, synthetic construct
EVQLVESGGGLVQPGGSLRLSCAASGSTFYTAVMGWVRQAPGKGLEWVAAIRWTALTTSYADSVKGRFTISRDGAKTTLYLQMNSLRPEDTAVYYCAARGTLGLFTTADSYDYWGQGTLVTVSSGGGGSGGGSGGIDWCPRYLWDECYNAGGGSGGGSGGGGSGGASSGAGGSGGGSQVQLVQSGAEVKKPGASVKVSCKASGYTFTSYYIHWVRQAPGQCLEWIGSIYPGNVNTNYNEKFKDRATLTVDTSISTAYMELSRLRSDDTAVYFCTRSHYGLDWNFDVWGQGTTVTVSSGGGGSGGGGSGGGGSDIQMTQSPSSLSASVGDRVTITCHASQNIYVWLNWYQQKPGKAPKLLIYKASNLHTGVPSRFSGSGSGTDFTLTISSLQPEDFATYYCQQGQTYPYTFGCGTKVEIKGGGGSDIQMTQSPSSLSASVGDRVTITCRASQGISNYLAWYQQKTGKVPKFLIYEASTLQSGVPSRFSGGGSGTDFTLTISSLQPEDVATYYCQNYNSAPFTFGPGTKVDIKRTVAAPSVFIFPPSDEQLKSGTASVVCLLNNFYPREAKVQWKVDNALQSGNSQESVTEQDSKDSTYSLSSTLTLSKADYEKHKVYACEVTHQGLSSPVTKSFNRGEC

SEQ ID NO: 178 - protein, 226 aa, synthetic construct; identical to SEQ ID NO: 20

SEQ ID NO: 179 - protein, 14 aa, synthetic construct
MDWCPIDLWNECFF

SEQ ID NO: 180 - protein, 14 aa, synthetic construct
MDWCPIHLWHVCFN

SEQ ID NO: 181 - protein, 14 aa, synthetic construct
MDWCPIYLWSECFN

SEQ ID NO: 182 - protein, 14 aa, synthetic construct
MNWCPKDIWYLCFN

SEQ ID NO: 183 - protein, 14 aa, synthetic construct
MDWCPLHMWHECFS

SEQ ID NO: 184 - protein, 14 aa, synthetic construct
MDWCPLYLWNECFN

SEQ ID NO: 185 - protein, 14 aa, synthetic construct
MDWCPRDLWDLCFA

SEQ ID NO: 186 - protein, 14 aa, synthetic construct
MDWCPRDLWHECFA

SEQ ID NO: 187 - protein, 14 aa, synthetic construct
MDWCPRDLWHLCFS

SEQ ID NO: 188 - protein, 14 aa, synthetic construct
MDWCPRDLWSECFF

SEQ ID NO: 189 - protein, 14 aa, synthetic construct
MDWCPRDMWDECFA

SEQ ID NO: 190 - protein, 14 aa, synthetic construct
MDWCPRDMWSECFA

SEQ ID NO: 191 - protein, 14 aa, synthetic construct
MDWCPRDMWSVCFS

SEQ ID NO: 192 - protein, 14 aa, synthetic construct
MDWCPRFMWDECFN

SEQ ID NO: 193 - protein, 14 aa, synthetic construct
MDWCPRHMWNYCFA

SEQ ID NO: 194 - protein, 14 aa, synthetic construct
MDWCPRSLWHECFA

SEQ ID NO: 195 - protein, 14 aa, synthetic construct
MDWCPRYLWHVCFA

SEQ ID NO: 196 - protein, 14 aa, synthetic construct
MHWCPVDLWYLCYN

SEQ ID NO: 197 - protein, 14 aa, synthetic construct
MDWCPVHLWSVCFA

SEQ ID NO: 198 - protein, 14 aa, synthetic construct
MDWCPMHLWHQCFN

SEQ ID NO: 199 - protein, 14 aa, synthetic construct
MDWCPIDMWDQCFN

SEQ ID NO: 200 - protein, 14 aa, synthetic construct
MAWCPRDKWSECFS

SEQ ID NO: 201 - protein, 14 aa, synthetic construct
MDWCPRHLWVHCFN

SEQ ID NO: 202 - protein, 14 aa, synthetic construct
MDWCPRALWHECFY

SEQ ID NO: 203 - protein, 14 aa, synthetic construct
MDWCPIALWAECFN

SEQ ID NO: 204 - protein, 14 aa, synthetic construct
MDWCPRPLWHECFS

SEQ ID NO: 205 - protein, 14 aa, synthetic construct
MHWCPIDLWAECYA

SEQ ID NO: 206 - protein, 14 aa, synthetic construct
MAWCPVYLWHECFN

SEQ ID NO: 207 - protein, 14 aa, synthetic construct
MSWCPIHLWNECFN

SEQ ID NO: 208 - protein, 14 aa, synthetic construct
MDWCPPYLWNVCFS

SEQ ID NO: 209 - protein, 14 aa, synthetic construct
MDWCPMDLWDYCFN

SEQ ID NO: 210 - protein, 14 aa, synthetic construct
MDWCPINLWDECFS

SEQ ID NO: 211 - protein, 14 aa, synthetic construct
MDWCPMHLWNKCFN

SEQ ID NO: 212 - protein, 14 aa, synthetic construct
MNWCPRDMWYQCFN

SEQ ID NO: 213 - protein, 14 aa, synthetic construct
QDWCPRHMWSFCFH

SEQ ID NO: 214 - protein, 14 aa, synthetic construct
MHWCPMDQWSNCFN

SEQ ID NO: 215 - protein, 14 aa, synthetic construct
MDWCPRHRWVDCFY

SEQ ID NO: 216 - protein, 14 aa, synthetic construct
MHWCPIDRWADCFN

SEQ ID NO: 217 - protein, 14 aa, synthetic construct
MDWCPRDSWHLCFA

SEQ ID NO: 218 - protein, 14 aa, synthetic construct
MDWCPRTLWYLCFN

SEQ ID NO: 219 - protein, 14 aa, synthetic construct
MVSCPTTMWNRCFN

SEQ ID NO: 220 - protein, 14 aa, synthetic construct
MDWCPSYLWNECFF

SEQ ID NO: 221 - protein, 14 aa, synthetic construct
MDWCPRALWAECFN

SEQ ID NO: 222 - protein, 14 aa, synthetic construct
MDWCPMYLWNECFN

SEQ ID NO: 223 - protein, 14 aa, synthetic construct
MDWCPRYLWNECFY

SEQ ID NO: 224 - protein, 14 aa, synthetic construct
MNWCPTALWHVCFN

SEQ ID NO: 225 - protein, 14 aa, synthetic construct
MDWCPMYMWYECFA

SEQ ID NO: 226 - protein, 14 aa, synthetic construct
MDWCPIHMWADCFA

SEQ ID NO: 227 - protein, 14 aa, synthetic construct
ITWCPSSMWNRCFI

SEQ ID NO: 228 - protein, 14 aa, synthetic construct
MDWCPRYLWHECFA

SEQ ID NO: 229 - protein, 14 aa, synthetic construct
MFWCPTTMWNRCFT

SEQ ID NO: 230 - protein, 14 aa, synthetic construct
MDWCPRALWHECFN

SEQ ID NO: 231 - protein, 14 aa, synthetic construct
MDWCPRDMWLFCYN

SEQ ID NO: 232 - protein, 14 aa, synthetic construct
MDWCPRSHWHVCYN

SEQ ID NO: 233 - protein, 14 aa, synthetic construct
MDWCPRYLWSDCFA

SEQ ID NO: 234 - protein, 14 aa, synthetic construct
MDWCPFYLWDECFN

SEQ ID NO: 235 - protein, 14 aa, synthetic construct
MDWCPRHLWHECFN

SEQ ID NO: 236 - protein, 14 aa, synthetic construct
MDWCPRDLWHECFS

SEQ ID NO: 237 - protein, 14 aa, synthetic construct
MDWCPMYLWNECFS

SEQ ID NO: 238 - protein, 14 aa, synthetic construct
MDWCPRFLWSVCFN

SEQ ID NO: 239 - protein, 14 aa, synthetic construct
MDWCPRDLWTECFA

SEQ ID NO: 240 - protein, 14 aa, synthetic construct
MDWCPRFLWDECFN

SEQ ID NO: 241 - protein, 14 aa, synthetic construct
MDWCPKYLWSVCFF

SEQ ID NO: 242 - protein, 14 aa, synthetic construct
MDWCPMDLWYQCFN

SEQ ID NO: 243 - protein, 14 aa, synthetic construct
MDWCPRHLWAECFF

SEQ ID NO: 244 - protein, 14 aa, synthetic construct
MDWCPKDLWYLCFA

SEQ ID NO: 245 - protein, 14 aa, synthetic construct
MDWCPIHLWHYCFN

SEQ ID NO: 246 - protein, 14 aa, synthetic construct
MDWCPRALWNVCFN

SEQ ID NO: 247 - protein, 14 aa, synthetic construct
MDWCPIDLWHLCFY

SEQ ID NO: 248 - protein, 14 aa, synthetic construct
MDWCPRDLWFLCYN

SEQ ID NO: 249 - protein, 14 aa, synthetic construct
MDWCPRHLWHECFF

SEQ ID NO: 250 - protein, 14 aa, synthetic construct
MDWCPRYLWTVCFS

SEQ ID NO: 251 - protein, 14 aa, synthetic construct
MDWCPRDLWSLCFY

SEQ ID NO: 252 - protein, 14 aa, synthetic construct
MDWCPRFLWSECFN

SEQ ID NO: 253 - protein, 14 aa, synthetic construct
MDWCPRTLWAYCFN

SEQ ID NO: 254 - protein, 14 aa, synthetic construct
MDWCPKDLWDYCFA

SEQ ID NO: 255 - protein, 14 aa, synthetic construct
MDWCPKYLWDVCFN

SEQ ID NO: 256 - protein, 14 aa, synthetic construct
MDWCPRYLWNMCFH

SEQ ID NO: 257 - protein, 14 aa, synthetic construct
MDWCPRYLWTECFN

SEQ ID NO: 258 - protein, 14 aa, synthetic construct
MDWCPRSLWHYCFA

SEQ ID NO: 259 - protein, 14 aa, synthetic construct
MDWCPRYLWAECFY

SEQ ID NO: 260 - protein, 14 aa, synthetic construct
MDWCPRDLWHECFN

SEQ ID NO: 261 - protein, 14 aa, synthetic construct
MDWCPRDLWDLCFF

SEQ ID NO: 262 - protein, 14 aa, synthetic construct
MDWCPRYLWNVCFN

SEQ ID NO: 263 - protein, 14 aa, synthetic construct
MDWCPIYLWDECFN

SEQ ID NO: 264 - protein, 14 aa, synthetic construct
MDWCPRDLWAECFN

SEQ ID NO: 265 - protein, 14 aa, synthetic construct
MDWCPRALWHECFT

SEQ ID NO: 266 - protein, 14 aa, synthetic construct
MDWCPKNLWHVCFN

SEQ ID NO: 267 - protein, 14 aa, synthetic construct
MDWCPRYLWDECFN

SEQ ID NO: 268 - protein, 14 aa, synthetic construct
MDWCPFYLWNECFY

SEQ ID NO: 269 - protein, 14 aa, synthetic construct
MHWCPRALWDVCYN

SEQ ID NO: 270 - protein, 14 aa, synthetic construct
MDWCPRDLWNVCFF

SEQ ID NO: 271 - protein, 14 aa, synthetic construct
MDWCPRYLWFECFA

SEQ ID NO: 272 - protein, 14 aa, synthetic construct
MDWCPRYLWHECFN

SEQ ID NO: 273 - protein, 14 aa, synthetic construct
MDWCPRDLWYACFA

SEQ ID NO: 274 - protein, 14 aa, synthetic construct
MDWCPRYLWFECFS

SEQ ID NO: 275 - protein, 14 aa, synthetic construct
MDWCPRHLWDECFF

SEQ ID NO: 276 - protein, 14 aa, synthetic construct
MDWCPRYLWHMCYS

SEQ ID NO: 277 - protein, 14 aa, synthetic construct
MDWCPRDLWHACFS

SEQ ID NO: 278 - protein, 14 aa, synthetic construct
MDWCPRDLWHVCFF

SEQ ID NO: 279 - protein, 14 aa, synthetic construct
MDWCPRDLWDQCYA

SEQ ID NO: 280 - protein, 14 aa, synthetic construct
MDWCPIHLWNECFA

SEQ ID NO: 281 - protein, 14 aa, synthetic construct
MDWCPRPLWDMCFF

SEQ ID NO: 282 - protein, 14 aa, synthetic construct
MDWCPVSLWHVCFY

SEQ ID NO: 283 - protein, 14 aa, synthetic construct
MDWCPRFLWNECFN

SEQ ID NO: 284 - protein, 14 aa, synthetic construct
MDWCPRALWNECFA

SEQ ID NO: 285 - protein, 14 aa, synthetic construct
MDWCPRDLWIECFF

SEQ ID NO: 286 - protein, 14 aa, synthetic construct
MDWCPSYLWTVCFA

SEQ ID NO: 287 - protein, 14 aa, synthetic construct
MDWCPRYLWDACFF

SEQ ID NO: 288 - protein, 14 aa, synthetic construct
MDWCPRSLWIYCFN

SEQ ID NO: 289 - protein, 14 aa, synthetic construct
MDWCPTYLWFECFN

SEQ ID NO: 290 - protein, 14 aa, synthetic construct
MDWCPRFLWDECFF

SEQ ID NO: 291 - protein, 14 aa, synthetic construct
MDWCPSYLWHECFA

SEQ ID NO: 292 - protein, 14 aa, synthetic construct
MDWCPKFLWHECFS

SEQ ID NO: 293 - protein, 14 aa, synthetic construct
MHWCPIYLWDECFN

SEQ ID NO: 294 - protein, 14 aa, synthetic construct
MDWCPRYLWHECFH

SEQ ID NO: 295 - protein, 14 aa, synthetic construct
MDWCPTNLWHECFA

SEQ ID NO: 296 - protein, 14 aa, synthetic construct
MDWCPRDLWDVCFA

SEQ ID NO: 297 - protein, 14 aa, synthetic construct
MDWCPMDLWDVCFN

SEQ ID NO: 298 - protein, 14 aa, synthetic construct
MDWCPRSLWNVCFF

SEQ ID NO: 299 - protein, 14 aa, synthetic construct
MDWCPVILWDFCFN

SEQ ID NO: 300 - protein, 14 aa, synthetic construct
LDWCPLNLWDLCYF

SEQ ID NO: 301 - protein, 14 aa, synthetic construct
MDWCPRHLWYACFN

SEQ ID NO: 302 - protein, 14 aa, synthetic construct
MDWCPKHLWIECFA

SEQ ID NO: 303 - protein, 14 aa, synthetic construct
MDWCPRHLWSECFY

SEQ ID NO: 304 - protein, 14 aa, synthetic construct
MHWCPRDLWVVCFN

SEQ ID NO: 305 - protein, 14 aa, synthetic construct
MHWCPEYLWNECFA

SEQ ID NO: 306 - protein, 14 aa, synthetic construct
MDWCPRDLWAVCFA

SEQ ID NO: 307 - protein, 14 aa, synthetic construct
MDWCPRHLWNVCFS

SEQ ID NO: 308 - protein, 14 aa, synthetic construct
MDFCPISLWHECFF

SEQ ID NO: 309 - protein, 14 aa, synthetic construct
MDWCPKYLWDKCFH

SEQ ID NO: 310 - protein, 14 aa, synthetic construct
MDWCPRHLWDLCFF

SEQ ID NO: 311 - protein, 14 aa, synthetic construct
MDWCPRDLWNVCFA

SEQ ID NO: 312 - protein, 14 aa, synthetic construct
MHWCPLHLWNECYH

SEQ ID NO: 313 - protein, 14 aa, synthetic construct
MDWCPKHLWHQCFH

SEQ ID NO: 314 - protein, 14 aa, synthetic construct
MDWCPRSLWSYCFH

SEQ ID NO: 315 - protein, 14 aa, synthetic construct
MDWCPRYLWTECFF

SEQ ID NO: 316 - protein, 14 aa, synthetic construct
MAWCPMNLWDQCFF

SEQ ID NO: 317 - protein, 14 aa, synthetic construct
MHWCPRALWHECFN

SEQ ID NO: 318 - protein, 14 aa, synthetic construct
MDWCPRHLWDQCFA

SEQ ID NO: 319 - protein, 14 aa, synthetic construct
MNWCPTDLWHECFN

SEQ ID NO: 320 - protein, 14 aa, synthetic construct
MFWCPRYLWHECFN

SEQ ID NO: 321 - protein, 14 aa, synthetic construct
MDWCPKFLWDLCFA

SEQ ID NO: 322 - protein, 14 aa, synthetic construct
MDWCPFYLWDECFL

SEQ ID NO: 323 - protein, 14 aa, synthetic construct
MDWCPRHLWDLCFA

SEQ ID NO: 324 - protein, 14 aa, synthetic construct
MSWCPQDLWHVCFN

SEQ ID NO: 325 - protein, 14 aa, synthetic construct
MDWCPKDLWHECFN

SEQ ID NO: 326 - protein, 14 aa, synthetic construct
MDWCPRDLWNVCFN

SEQ ID NO: 327 - protein, 14 aa, synthetic construct
MNWCPSDLWHLCFN

SEQ ID NO: 328 - protein, 14 aa, synthetic construct
MNWCPSHLWHMCYF

SEQ ID NO: 329 - protein, 14 aa, synthetic construct
MDWCPPYLWYECFA

SEQ ID NO: 330 - protein, 14 aa, synthetic construct
MDWCPMNLWSECFN

SEQ ID NO: 331 - protein, 14 aa, synthetic construct
MDWCPKHLWNECFN

SEQ ID NO: 332 - protein, 14 aa, synthetic construct
MDWCPAYLWAECFS

SEQ ID NO: 333 - protein, 14 aa, synthetic construct
MDWCPSDLWHECFH

SEQ ID NO: 334 - protein, 14 aa, synthetic construct
MDWCPVSLWDHCFN

SEQ ID NO: 335 - protein, 14 aa, synthetic construct
LDWCPRDLWHVCFF

SEQ ID NO: 336 - protein, 14 aa, synthetic construct
MDWCPWILWNECFN

SEQ ID NO: 337 - protein, 14 aa, synthetic construct
MHWCPRYLWDECFN

SEQ ID NO: 338 - protein, 14 aa, synthetic construct
MYWCPRDLWDVCFN

SEQ ID NO: 339 - protein, 14 aa, synthetic construct
MHWCPRSLWNECYF

SEQ ID NO: 340 - protein, 14 aa, synthetic construct
IDWCPRDLWALCFN

SEQ ID NO: 341 - protein, 14 aa, synthetic construct
MHWCPINLWNECFS

SEQ ID NO: 342 - protein, 14 aa, synthetic construct
MERCPRFLWNECFN

SEQ ID NO: 343 - protein, 14 aa, synthetic construct
QDWCPTYLWHHCFN

SEQ ID NO: 344 - protein, 14 aa, synthetic construct
IGKLTLCLNADLVI

SEQ ID NO: 345 - protein, 14 aa, synthetic construct
MDWCPSYLWDQCFF

SEQ ID NO: 346 - protein, 14 aa, synthetic construct
VDWCPRYLWHVCYN

SEQ ID NO: 347 - protein, 14 aa, synthetic construct
MDWCPRDMWAECFF

SEQ ID NO: 348 - protein, 14 aa, synthetic construct
MDWCPRDMWYECFN

SEQ ID NO: 349 - protein, 14 aa, synthetic construct
DVWCPKYMWSLCFN

SEQ ID NO: 350 - protein, 14 aa, synthetic construct
MDWCPMDMWVNCFN

SEQ ID NO: 351 - protein, 14 aa, synthetic construct
MDWCPSDMWHECYA

SEQ ID NO: 352 - protein, 14 aa, synthetic construct
MDWCPKHMWFMCFN

SEQ ID NO: 353 - protein, 14 aa, synthetic construct
MDWCPRYMWYQCFS

SEQ ID NO: 354 - protein, 14 aa, synthetic construct
MDWCPRHMWYECFF

SEQ ID NO: 355 - protein, 14 aa, synthetic construct
MDWCPRAMWNHCFN

SEQ ID NO: 356 - protein, 14 aa, synthetic construct
MDWCPRNMWAQCFA

SEQ ID NO: 357 - protein, 14 aa, synthetic construct
MFWCPFDMWHFCFN

SEQ ID NO: 358 - protein, 14 aa, synthetic construct
MDWCPRDMWDQCFD

SEQ ID NO: 359 - protein, 14 aa, synthetic construct
MFWCPMDMWDQCFN

SEQ ID NO: 360 - protein, 14 aa, synthetic construct
MSWCPRDMWFYCYA

SEQ ID NO: 361 - protein, 14 aa, synthetic construct
MDWCPRHMWNVCFS

SEQ ID NO: 362 - protein, 14 aa, synthetic construct
MDWCPTDMWHHCFL

SEQ ID NO: 363 - protein, 14 aa, synthetic construct
IHWCPINMWDKCYN

SEQ ID NO: 364 - protein, 14 aa, synthetic construct
MDWCPRAMWHECFY

SEQ ID NO: 365 - protein, 14 aa, synthetic construct
MDWCPTDMWIVCFA

SEQ ID NO: 366 - protein, 14 aa, synthetic construct
IDWCPQDMWFYCFN

SEQ ID NO: 367 - protein, 14 aa, synthetic construct
MDWCPRDMWFECFA

SEQ ID NO: 368 - protein, 14 aa, synthetic construct
MDWCPRNMWTVCFL

SEQ ID NO: 369 - protein, 14 aa, synthetic construct
MDWCPRAMWDKCFF

SEQ ID NO: 370 - protein, 14 aa, synthetic construct
MNWCPSYMWDQCFA

SEQ ID NO: 371 - protein, 14 aa, synthetic construct
MDWCPTYMWSECFN

SEQ ID NO: 372 - protein, 14 aa, synthetic construct
MDWCPRYMWNECFN

SEQ ID NO: 373 - protein, 14 aa, synthetic construct
MDWCPMNMWYQCFN

SEQ ID NO: 374 - protein, 14 aa, synthetic construct
MDWCPWDMWDKCFN

SEQ ID NO: 375 - protein, 14 aa, synthetic construct
TFGCPTTMWNRCFA

SEQ ID NO: 376 - protein, 14 aa, synthetic construct
NYWCPSSMWNRCLH

SEQ ID NO: 377 - protein, 14 aa, synthetic construct
FDFCPTTMWTYCQH

SEQ ID NO: 378 - protein, 14 aa, synthetic construct
TTWCPTSMWLHCFD

SEQ ID NO: 379 - protein, 14 aa, synthetic construct
MDWCPRDQWHNCFN

SEQ ID NO: 380 - protein, 14 aa, synthetic construct
MDWCPRDRWVDCFF

SEQ ID NO: 381 - protein, 14 aa, synthetic construct
MDWCPKDRWNDCYF

SEQ ID NO: 382 - protein, 14 aa, synthetic construct
MDWCPRDRWADCFF

SEQ ID NO: 383 - protein, 14 aa, synthetic construct
MDWCPRDRWIDCFN

SEQ ID NO: 384 - protein, 14 aa, synthetic construct
MDWCPRDRWSDCFN

SEQ ID NO: 385 - protein, 14 aa, synthetic construct
ITWCHVISGLECWN

SEQ ID NO: 386 - protein, 14 aa, synthetic construct
VPWCQIISGLECLT

SEQ ID NO: 387 - protein, 14 aa, synthetic construct
APWCQIISGLECLT

SEQ ID NO: 388 - protein, 14 aa, synthetic construct
VPWCLIISGLDCLN

SEQ ID NO: 389 - protein, 14 aa, synthetic construct
MDWCARFVGYGCLD

SEQ ID NO: 390 - protein, 14 aa, synthetic construct
MTWCPTSFWNRCLD

SEQ ID NO: 391 - protein, 14 aa, synthetic construct
MDWCPRALWFECFF

SEQ ID NO: 392 - protein, 14 aa, synthetic construct
MDWCPRYLWHECFS

SEQ ID NO: 393 - protein, 14 aa, synthetic construct
MDWCPRDLWNLCFF

SEQ ID NO: 394 - protein, 14 aa, synthetic construct
MDWCPSYLWHECFF

SEQ ID NO: 395 - protein, 14 aa, synthetic construct
MDWCPPYLWSECFA

SEQ ID NO: 396 - protein, 14 aa, synthetic construct
MDWCPRYLWHVCFN

SEQ ID NO: 397 - protein, 14 aa, synthetic construct
MDWCPRTLWHVCFN

SEQ ID NO: 398 - protein, 14 aa, synthetic construct
MDWCPRHLWHECYS

SEQ ID NO: 399 - protein, 14 aa, synthetic construct
MDWCPKHLWTECFA

SEQ ID NO: 400 - protein, 14 aa, synthetic construct
MDWCPRHLWYECFN

SEQ ID NO: 401 - protein, 14 aa, synthetic construct
MDWCPRYLWHECFD

SEQ ID NO: 402 - protein, 14 aa, synthetic construct
MDWCPRNLWHLCFA

SEQ ID NO: 403 - protein, 14 aa, synthetic construct
MDWCPKHLWNKCFN

SEQ ID NO: 404 - protein, 14 aa, synthetic construct
MDWCPRFMWAECFN

SEQ ID NO: 405 - protein, 14 aa, synthetic construct
MDWCPRNMWHHCFD

SEQ ID NO: 406 - protein, 14 aa, synthetic construct
MDWCPSDMWAHCYN

SEQ ID NO: 407 - protein, 14 aa, synthetic construct
MDWCPKVMWHYCFA

SEQ ID NO: 408 - protein, 14 aa, synthetic construct
MDWCPRFMWSECFS

SEQ ID NO: 409 - protein, 14 aa, synthetic construct
MDWCPRHMWINCFA

SEQ ID NO: 410 - protein, 14 aa, synthetic construct
MVGCATSMWNRCLT

SEQ ID NO: 411 - protein, 14 aa, synthetic construct
MDWCPRYLWSECFA

SEQ ID NO: 412 - protein, 14 aa, synthetic construct
MDWCPRHLWSVCFN

SEQ ID NO: 413 - protein, 14 aa, synthetic construct
MDWCPFDLWHVCYN

SEQ ID NO: 414 - protein, 14 aa, synthetic construct
MDWCPRFLWHECFN

SEQ ID NO: 415 - protein, 14 aa, synthetic construct
MDWCPRSLWHVCFN

SEQ ID NO: 416 - protein, 14 aa, synthetic construct
MDWCPRNLWHACFN

SEQ ID NO: 417 - protein, 14 aa, synthetic construct
MDWCPVFMWNECFN

SEQ ID NO: 418 - protein, 14 aa, synthetic construct
MDWCPMFMWHECFN

SEQ ID NO: 419 - protein, 14 aa, synthetic construct
MYWCATSMWNRCFV

SEQ ID NO: 420 - protein, 14 aa, synthetic construct
MDWCPRHMWHECFA

SEQ ID NO: 421 - protein, 14 aa, synthetic construct
MDWCPRHLWHVCFN

SEQ ID NO: 422 - protein, 14 aa, synthetic construct
MDWCPRFMWDLCFA

SEQ ID NO: 423 - protein, 14 aa, synthetic construct
VTSCPTTMWNRCFS

SEQ ID NO: 424 - protein, 14 aa, synthetic construct
MTLCLSVDLVHCWY

SEQ ID NO: 425 - protein, 14 aa, synthetic construct
DSFCTWSAWQECGR

SEQ ID NO: 426 - protein, 14 aa, synthetic construct
MDWCPRDFWAFCFF

SEQ ID NO: 427 - protein, 14 aa, synthetic construct
MDWCPTSFWNRCFH

SEQ ID NO: 428 - protein, 14 aa, synthetic construct
MVWCMSVGWAVCLN

SEQ ID NO: 429 - protein, 14 aa, synthetic construct
IDWCPTAGWTYCWF

SEQ ID NO: 430 - protein, 14 aa, synthetic construct
WVSCLRHHWLECFH

SEQ ID NO: 431 - protein, 14 aa, synthetic construct
MDWCPRDHWVDCYS

SEQ ID NO: 432 - protein, 14 aa, synthetic construct
IDWCPKIHWDLCYF

SEQ ID NO: 433 - protein, 14 aa, synthetic construct
MDWCPRSHWSECFS

SEQ ID NO: 434 - protein, 14 aa, synthetic construct
MDWCPRSIWYLCFN

SEQ ID NO: 435 - protein, 14 aa, synthetic construct
MDWCPRYLWAECFN

SEQ ID NO: 436 - protein, 14 aa, synthetic construct
MDWCPRYLWDYCFA

SEQ ID NO: 437 - protein, 14 aa, synthetic construct
MDWCPRSLWFLCFN

SEQ ID NO: 438 - protein, 14 aa, synthetic construct
MDWCPRDLWFACFA

SEQ ID NO: 439 - protein, 14 aa, synthetic construct
MDWCPRHLWNECFN

SEQ ID NO: 440 - protein, 14 aa, synthetic construct
MDWCPRFLWHVCFS

SEQ ID NO: 441 - protein, 14 aa, synthetic construct
MDWCPRDLWAMCFA

SEQ ID NO: 442 - protein, 14 aa, synthetic construct
MERCPRYLWHMCYS

SEQ ID NO: 443 - protein, 14 aa, synthetic construct
MDWCPIALWDFCFA

SEQ ID NO: 444 - protein, 14 aa, synthetic construct
MDWCPRYLWNVCFA

SEQ ID NO: 445 - protein, 14 aa, synthetic construct
MDWCPRDLWSVCFS

SEQ ID NO: 446 - protein, 14 aa, synthetic construct
MDWCPRYLWHVCFY

SEQ ID NO: 447 - protein, 14 aa, synthetic construct
MDWCPRALWDHCFF

SEQ ID NO: 448 - protein, 14 aa, synthetic construct
MDWCPRHLWFECFN

SEQ ID NO: 449 - protein, 14 aa, synthetic construct
MDWCPRSLWDYCFA

SEQ ID NO: 450 - protein, 14 aa, synthetic construct
MDWCPRHLWTECFS

SEQ ID NO: 451 - protein, 14 aa, synthetic construct
MDWCPLYLWAECFN

SEQ ID NO: 452 - protein, 14 aa, synthetic construct
MDWCPIYLWAECFN

SEQ ID NO: 453 - protein, 14 aa, synthetic construct
MDWCPRHLWFECFF

SEQ ID NO: 454 - protein, 14 aa, synthetic construct
MDWCPRYLWHECFF

SEQ ID NO: 455 - protein, 14 aa, synthetic construct
MDWCPRYLWHVCFD

SEQ ID NO: 456 - protein, 14 aa, synthetic construct
MDWCPRYLWTECFS

SEQ ID NO: 457 - protein, 14 aa, synthetic construct
MDWCPKFLWDECFA

SEQ ID NO: 458 - protein, 14 aa, synthetic construct
MDWCPRDLWTECFS

SEQ ID NO: 459 - protein, 14 aa, synthetic construct
MDWCPRHLWNECFA

SEQ ID NO: 460 - protein, 14 aa, synthetic construct
MDWCPRYLWPVCFH

SEQ ID NO: 461 - protein, 14 aa, synthetic construct
MDWCPKSLWAECFN

SEQ ID NO: 462 - protein, 14 aa, synthetic construct
MDWCPMFLWHECFN

SEQ ID NO: 463 - protein, 14 aa, synthetic construct
MDWCPRDLWDECFN

SEQ ID NO: 464 - protein, 14 aa, synthetic construct
MDWCPRDLWYQCFN

SEQ ID NO: 465 - protein, 14 aa, synthetic construct
MDWCPRSLWNYCFN

SEQ ID NO: 466 - protein, 14 aa, synthetic construct
MDWCPIHLWNECFN

SEQ ID NO: 467 - protein, 14 aa, synthetic construct
MDWCPTYLWHVCFS

SEQ ID NO: 468 - protein, 14 aa, synthetic construct
MDWCPRSLWNYCFA

SEQ ID NO: 469 - protein, 14 aa, synthetic construct
MDWCPRHLWHECFT

SEQ ID NO: 470 - protein, 14 aa, synthetic construct
MDWCPMFLWDECFN

SEQ ID NO: 471 - protein, 14 aa, synthetic construct
MSWCPRDLWHLCFF

SEQ ID NO: 472 - protein, 14 aa, synthetic construct
MDWCPTYLWNECFN

SEQ ID NO: 473 - protein, 14 aa, synthetic construct
MDWCPRDLWYVCFA

SEQ ID NO: 474 - protein, 14 aa, synthetic construct
MDWCPRHLWIECFN

SEQ ID NO: 475 - protein, 14 aa, synthetic construct
MDWCPTYLWNVCFA

SEQ ID NO: 476 - protein, 14 aa, synthetic construct
MDWCPRHLWYECFS

SEQ ID NO: 477 - protein, 14 aa, synthetic construct
MDWCPAYLWDECFA

SEQ ID NO: 478 - protein, 14 aa, synthetic construct
MFWCPITLWNECFN

SEQ ID NO: 479 - protein, 14 aa, synthetic construct
MHWCPRDLWHVCFN

SEQ ID NO: 480 - protein, 14 aa, synthetic construct
MDWCPRALWDHCFN

SEQ ID NO: 481 - protein, 14 aa, synthetic construct
MDWCPRALWNVCFA

SEQ ID NO: 482 - protein, 14 aa, synthetic construct
MDWCPRFLWDVCFN

SEQ ID NO: 483 - protein, 14 aa, synthetic construct
MDWCPRHLWDECFY

SEQ ID NO: 484 - protein, 14 aa, synthetic construct
IDWCPRALWDACLA

SEQ ID NO: 485 - protein, 14 aa, synthetic construct
MDWCPTDLWHECFA

SEQ ID NO: 486 - protein, 14 aa, synthetic construct
MDWCPRYLWDECFS

SEQ ID NO: 487 - protein, 14 aa, synthetic construct
MDWCPRFLWDYCFA

SEQ ID NO: 488 - protein, 14 aa, synthetic construct
MDWCPRDLWNWCFN

SEQ ID NO: 489 - protein, 14 aa, synthetic construct
MDWCPKPLWHVCFA

SEQ ID NO: 490 - protein, 14 aa, synthetic construct
MDWCPRFLWNECFY

SEQ ID NO: 491 - protein, 14 aa, synthetic construct
MDWCPRTLWDQCFF

SEQ ID NO: 492 - protein, 14 aa, synthetic construct
MSWCPIDLWSECFA

SEQ ID NO: 493 - protein, 14 aa, synthetic construct
MDWCPRHLWDECFN

SEQ ID NO: 494 - protein, 14 aa, synthetic construct
MDWCPRNLWHECFA

SEQ ID NO: 495 - protein, 14 aa, synthetic construct
MDWCPRDLWTQCFF

SEQ ID NO: 496 - protein, 14 aa, synthetic construct
MDWCPRHLWVHCFS

SEQ ID NO: 497 - protein, 14 aa, synthetic construct
MDFCPRFLWHECFN

SEQ ID NO: 498 - protein, 14 aa, synthetic construct
MDWCPRHLWHACFS

SEQ ID NO: 499 - protein, 14 aa, synthetic construct
MDWCPLFLWDQCFN

SEQ ID NO: 500 - protein, 14 aa, synthetic construct
MAWCPWYLWDECFN

SEQ ID NO: 501 - protein, 14 aa, synthetic construct
LDWCPRHLWALCFN

SEQ ID NO: 502 - protein, 14 aa, synthetic construct
MDWCPWFLWNECFN

SEQ ID NO: 503 - protein, 14 aa, synthetic construct
MDWCPMNLWHECFA

SEQ ID NO: 504 - protein, 14 aa, synthetic construct
MDWCPIHLWYECFN

SEQ ID NO: 505 - protein, 14 aa, synthetic construct
IDWCPLHLWHECYH

SEQ ID NO: 506 - protein, 14 aa, synthetic construct
MDWCPRYLWLECFN

SEQ ID NO: 507 - protein, 14 aa, synthetic construct
MDWCPMYLWDECFF

SEQ ID NO: 508 - protein, 14 aa, synthetic construct
MDWCPRLLWHECFN

SEQ ID NO: 509 - protein, 14 aa, synthetic construct
MDWCPPHLWHECFF

SEQ ID NO: 510 - protein, 14 aa, synthetic construct
MDWCPRPLWHECFA

SEQ ID NO: 511 - protein, 14 aa, synthetic construct
MDWCPMFLWHECFS

SEQ ID NO: 512 - protein, 14 aa, synthetic construct
MHWCPRHLWSECFN

SEQ ID NO: 513 - protein, 14 aa, synthetic construct
MDWCPRILWHECFS

SEQ ID NO: 514 - protein, 14 aa, synthetic construct
MNWCPMHLWAECFN

SEQ ID NO: 515 - protein, 14 aa, synthetic construct
MDWCPRSLWAQCFY

SEQ ID NO: 516 - protein, 14 aa, synthetic construct
MDWCPSYLWPVCFN

SEQ ID NO: 517 - protein, 14 aa, synthetic construct
MHWCPLYLWDECFY

SEQ ID NO: 518 - protein, 14 aa, synthetic construct
MDWCPSFLWYECFN

SEQ ID NO: 519 - protein, 14 aa, synthetic construct
MSWCPPYLWTVCYN

SEQ ID NO: 520 - protein, 14 aa, synthetic construct
MHWCPRDLWYECFA

SEQ ID NO: 521 - protein, 14 aa, synthetic construct
MTWCPAYLWHECFN

SEQ ID NO: 522 - protein, 14 aa, synthetic construct
MAWCPRYLWAECFF

SEQ ID NO: 523 - protein, 14 aa, synthetic construct
MDWCPRYLWVDCFA

SEQ ID NO: 524 - protein, 14 aa, synthetic construct
MDWCPRILWSDCFN

SEQ ID NO: 525 - protein, 14 aa, synthetic construct
MAWCPLDLWDKCFY

SEQ ID NO: 526 - protein, 14 aa, synthetic construct
MNWCPRALWHECFL

SEQ ID NO: 527 - protein, 14 aa, synthetic construct
MDWCPRHLWTYCFH

SEQ ID NO: 528 - protein, 14 aa, synthetic construct
MDWCPFDLWLECFN

SEQ ID NO: 529 - protein, 14 aa, synthetic construct
MHWCPLHLWNECFA

SEQ ID NO: 530 - protein, 14 aa, synthetic construct
MDWCPRNLWAECFS

SEQ ID NO: 531 - protein, 14 aa, synthetic construct
MDYCPSYLWHECFA

SEQ ID NO: 532 - protein, 14 aa, synthetic construct
MAWCPRILWHQCFN

SEQ ID NO: 533 - protein, 14 aa, synthetic construct
ITWCPTSLWNRCLV

SEQ ID NO: 534 - protein, 14 aa, synthetic construct
LAGCQRDLATVCVI

SEQ ID NO: 535 - protein, 14 aa, synthetic construct
IMWCPTSLWNRCVT

SEQ ID NO: 536 - protein, 14 aa, synthetic construct
ILRCQMNLQDECLN

SEQ ID NO: 537 - protein, 14 aa, synthetic construct
NHWCPTTLWNRCVA

SEQ ID NO: 538 - protein, 14 aa, synthetic construct
MDWCPRHLWLECFN

SEQ ID NO: 539 - protein, 14 aa, synthetic construct
MDWCPRFMWNFCFF

SEQ ID NO: 540 - protein, 14 aa, synthetic construct
MDWCPSDMWANCFF

SEQ ID NO: 541 - protein, 14 aa, synthetic construct
IDWCPMHMWDFCYN

SEQ ID NO: 542 - protein, 14 aa, synthetic construct
MDWCPFDMWADCFF

SEQ ID NO: 543 - protein, 14 aa, synthetic construct
LHWCPTSMWTYCYY

SEQ ID NO: 544 - protein, 14 aa, synthetic construct
MDWCPRDMWFECFN

SEQ ID NO: 545 - protein, 14 aa, synthetic construct
MDWCPRYMWSDCFF

SEQ ID NO: 546 - protein, 14 aa, synthetic construct
MDWCPKDMWAECFN

SEQ ID NO: 547 - protein, 14 aa, synthetic construct
TDWCPRDMWYLCFN

SEQ ID NO: 548 - protein, 14 aa, synthetic construct
MDWCPRAMWDYCFY

SEQ ID NO: 549 - protein, 14 aa, synthetic construct
MDWCPRNMWNECFF

SEQ ID NO: 550 - protein, 14 aa, synthetic construct
MDWCPRSMWDSCFN

SEQ ID NO: 551 - protein, 14 aa, synthetic construct
MHWCPTYMWSECFA

SEQ ID NO: 552 - protein, 14 aa, synthetic construct
MDWCPLDMWVLCFA

SEQ ID NO: 553 - protein, 14 aa, synthetic construct
MDWCPRHMWHECFH

SEQ ID NO: 554 - protein, 14 aa, synthetic construct
MSWCPWDMWNECFA

SEQ ID NO: 555 - protein, 14 aa, synthetic construct
MDWCPRDMWTSCFN

SEQ ID NO: 556 - protein, 14 aa, synthetic construct
MDWCPMSMWAFCFD

SEQ ID NO: 557 - protein, 14 aa, synthetic construct
MNWCPIDMWTECFN

SEQ ID NO: 558 - protein, 14 aa, synthetic construct
MNWCPIHMWNQCFA

SEQ ID NO: 559 - protein, 14 aa, synthetic construct
MFWCPKDMWAECFA

SEQ ID NO: 560 - protein, 14 aa, synthetic construct
LHWCPITMWTYCYY

SEQ ID NO: 561 - protein, 14 aa, synthetic construct
IDWCPRYMWHECFF

SEQ ID NO: 562 - protein, 14 aa, synthetic construct
MSWCPRFMWHECFN

SEQ ID NO: 563 - protein, 14 aa, synthetic construct
QHWCPRDMWNDCYA

SEQ ID NO: 564 - protein, 14 aa, synthetic construct
MDWCPSDMWSNCFN

SEQ ID NO: 565 - protein, 14 aa, synthetic construct
LYWCPRDMWAYCYS

SEQ ID NO: 566 - protein, 14 aa, synthetic construct
MDWCPMYMWHKCFH

SEQ ID NO: 567 - protein, 14 aa, synthetic construct
MDWCPSNMWNECFF

SEQ ID NO: 568 - protein, 14 aa, synthetic construct
IYWCPTAMWNRCSA

SEQ ID NO: 569 - protein, 14 aa, synthetic construct
MYWCPKYMWSECFA

SEQ ID NO: 570 - protein, 14 aa, synthetic construct
VDWCPAHMWNECYN

SEQ ID NO: 571 - protein, 14 aa, synthetic construct
MFWCPSTMWNRCFD

SEQ ID NO: 572 - protein, 14 aa, synthetic construct
TIFCPSTMWNRCWT

SEQ ID NO: 573 - protein, 14 aa, synthetic construct
MYWCPINMWDYCYA

SEQ ID NO: 574 - protein, 14 aa, synthetic construct
INLCPTPMWNRCWL

SEQ ID NO: 575 - protein, 14 aa, synthetic construct
ITQCPSTMWNRCSV

SEQ ID NO: 576 - protein, 14 aa, synthetic construct
MDLCPTAMWNRCFY

SEQ ID NO: 577 - protein, 14 aa, synthetic construct
MFLCPSAMWNRCFY

SEQ ID NO: 578 - protein, 14 aa, synthetic construct
VILCPTTMWNRCFH

SEQ ID NO: 579 - protein, 14 aa, synthetic construct
MNWCPSTMWNRCLT

SEQ ID NO: 580 - protein, 14 aa, synthetic construct
IHLCHWVPWIKCSH

SEQ ID NO: 581 - protein, 14 aa, synthetic construct
MAWCPADQWHECFN

SEQ ID NO: 582 - protein, 14 aa, synthetic construct
IDWCPIIQGLPCFA

SEQ ID NO: 583 - protein, 14 aa, synthetic construct
MAWCPWAQFDECLA

SEQ ID NO: 584 - protein, 14 aa, synthetic construct
IVWCPTTQWNRCAT

SEQ ID NO: 585 - protein, 14 aa, synthetic construct
MDWCPRDRWVDCYA

SEQ ID NO: 586 - protein, 14 aa, synthetic construct
MDWCPRDRWADCFN

SEQ ID NO: 587 - protein, 14 aa, synthetic construct
MDWCPVDRWADCFN

SEQ ID NO: 588 - protein, 14 aa, synthetic construct
MDWCPMSRWAFCFD

SEQ ID NO: 589 - protein, 14 aa, synthetic construct
MDWCPRDRWDVCFA

SEQ ID NO: 590 - protein, 14 aa, synthetic construct
MDWCPRDRWVDCFN

SEQ ID NO: 591 - protein, 14 aa, synthetic construct
MDWCPRDRWDDCFF

SEQ ID NO: 592 - protein, 14 aa, synthetic construct
IYWCPIDRWNDCYN

SEQ ID NO: 593 - protein, 14 aa, synthetic construct
MDWCPMTRWNDCYF

SEQ ID NO: 594 - protein, 14 aa, synthetic construct
VNQCTRYRWAECLN

SEQ ID NO: 595 - protein, 14 aa, synthetic construct
MDWCPRARWHDCFF

SEQ ID NO: 596 - protein, 14 aa, synthetic construct
MDWCPRDRWDDCFN

SEQ ID NO: 597 - protein, 14 aa, synthetic construct
MDWCPRDRWDVCYY

SEQ ID NO: 598 - protein, 14 aa, synthetic construct
MAWCPWASFDECLA

SEQ ID NO: 599 - protein, 14 aa, synthetic construct
MVDCPLISFDECLA

SEQ ID NO: 600 - protein, 14 aa, synthetic construct
EDWCPTDVWPYCFS

SEQ ID NO: 601 - protein, 14 aa, synthetic construct
MDWCPRFWWHECYA

SEQ ID NO: 602 - protein, 14 aa, synthetic construct
MDWCPRDWWHMCFN

SEQ ID NO: 603 - protein, 14 aa, synthetic construct
MDWCPSDYWYVCFA

SEQ ID NO: 604 - protein, 16 aa, synthetic construct
SGGGGSGGASSGAGGS

SEQ ID NO: 605 - protein, 9 aa, synthetic construct
  VARIANT 1..9: note = This sequence may encompass 1-3 GGS repeating units
GGSGGSGGS

SEQ ID NO: 606 - protein, 5 aa, synthetic construct
GSGGS

SEQ ID NO: 607 - protein, 4 aa, synthetic construct
GGGS

SEQ ID NO: 608 - protein, 5 aa, synthetic construct
GGGGS

SEQ ID NO: 609 - protein, 6 aa, synthetic construct
GSSGGS

SEQ ID NO: 610 - protein, 11 aa, synthetic construct
GGGGSGGGSGG

SEQ ID NO: 611 - protein, 8 aa, synthetic construct
GFTFNKYA

SEQ ID NO: 612 - protein, 10 aa, synthetic construct
IRSKYNNYAT

SEQ ID NO: 613 - protein, 16 aa, synthetic construct
VRHGNFGNSYISYWAY

SEQ ID NO: 614 - protein, 9 aa, synthetic construct
TGAVTSGNY

SEQ ID NO: 615 - skipped

SEQ ID NO: 616 - protein, 9 aa, synthetic construct
VLWYSNRWV

SEQ ID NO: 617 - protein, 8 aa, synthetic construct
GFTFNTYA

SEQ ID NO: 618 - protein, 10 aa, synthetic construct
IRSKYNNYAT

SEQ ID NO: 619 - protein, 16 aa, synthetic construct
VRHGNFGNSYVSWFAY

SEQ ID NO: 620 - protein, 9 aa, synthetic construct
TGAVTTSNY

SEQ ID NO: 621 - skipped

SEQ ID NO: 622 - protein, 9 aa, synthetic construct
ALWYSNLWV

SEQ ID NO: 623 - protein, 249 aa, synthetic construct
EVQLVESGGGLVQPGGSLKLSCAASGFTFNKYAMNWVRQAPGKGLEWVARIRSKYNNYATYYADSVKDRFTISRDDSKNTAYLQMNNLKTEDTAVYYCVRHGNFGNSYISYWAYWGQGTLVTVSSGGGGSGGGGSGGGGSQTVVTQEPSLTVSPGGTVTLTCGSSTGAVTSGNYPNWVQQKPGQAPRGLIGGTKFLAPGTPARFSGSLLGGKAALTLSGVQPEDEAEYYCVLWYSNRWVFGGGTKLTVL

SEQ ID NO: 624 - protein, 249 aa, synthetic construct
QTVVTQEPSLTVSPGGTVTLTCRSSTGAVTTSNYANWVQQKPGQAPRGLIGGTNKRAPGTPARFSGSLLGGKAALTLSGVQPEDEAEYYCALWYSNLWVFGGGTKLTVLGGGGSGGGGSGGGGSEVQLVESGGGLVQPGGSLKLSCAASGFTFNTYAMNWVRQAPGKGLEWVARIRSKYNNYATYYADSVKDRFTISRDDSKNTAYLQMNNLKTEDTAVYYCVRHGNFGNSYVSWFAYWGQGTLVTVSS

SEQ ID NO: 625 - protein, 14 aa, synthetic construct
GSQCLGPEWEVCPY

SEQ ID NO: 626 - protein, 14 aa, synthetic construct
VYCGPEFDESVGCM

SEQ ID NO: 627 - protein, 14 aa, synthetic construct
VYCGPEFDESVGCA

SEQ ID NO: 628 - protein, 14 aa, synthetic construct
YLCGPDGDETLACY

SEQ ID NO: 629 - protein, 6 aa, synthetic construct
QSIGTN

SEQ ID NO: 630 - skipped

SEQ ID NO: 631 - protein, 9 aa, synthetic construct
QQNNNWPTT

SEQ ID NO: 632 - protein, 8 aa, synthetic construct
GFSLTNYG

SEQ ID NO: 633 - protein, 7 aa, synthetic construct
IWSGGNT

SEQ ID NO: 634 - protein, 13 aa, synthetic construct
ARALTYYDYEFAY

SEQ ID NO: 635 - protein, 214 aa, synthetic construct
QILLTQSPVILSVSPGERVSFSCRASQSIGTNIHWYQQRTNGSPRLLIKYASESISGIPSRFSGSGSGTDFTLSINSVESEDIADYYCQQNNNWPTTFGAGTKLELKRTVAAPSVFIFPPSDEQLKSGTASVVCLLNNFYPREAKVQWKVDNALQSGNSQESVTEQDSKDSTYSLSSTLTLSKADYEKHKVYACEVTHQGLSSPVTKSFNRGEC

SEQ ID NO: 636 - protein, 214 aa, synthetic construct
DILLTQSPVILSVSPGERVSFSCRASQSIGTNIHWYQQRTNGSPRLLIKYASESISGIPSRFSGSGSGTDFTLSINSVESEDIADYYCQQNNNWPTTFGAGTKLELKRTVAAPSVFIFPPSDEQLKSGTASVVCLLNNFYPREAKVQWKVDNALQSGNSQESVTEQDSKDSTYSLSSTLTLSKADYEKHKVYACEVTHQGLSSPVTKSFNRGEC

SEQ ID NO: 637 - protein, 222 aa, synthetic construct
QVQLKQSGPGLVQPSQSLSITCTVSGFSLTNYGVHWVRQSPGKGLEWLGVIWSGGNTDYNTPFTSRLSINKDNSKSQVFFKMNSLQSNDTAIYYCARALTYYDYEFAYWGQGTLVTVSAASTKGPSVFPLAPSSKSTSGGTAALGCLVKDYFPEPVTVSWNSGALTSGVHTFPAVLQSSGLYSLSSVVTVPSSSLGTQTYICNVNHKPSNTKVDKKVEPKSC

SEQ ID NO: 638 - protein, 222 aa, synthetic construct
QVQLKQSGPGLVQPSQSLSITCTVSGFSLTNYGVHWVRQSPGKGLEWLGVIWSGGNTDYNTPFTSRLSINKDNSKSQVFFKMNSLQSQDTAIYYCARALTYYDYEFAYWGQGTLVTVSAASTKGPSVFPLAPSSKSTSGGTAALGCLVKDYFPEPVTVSWNSGALTSGVHTFPAVLQSSGLYSLSSVVTVPSSSLGTQTYICNVNHKPSNTKVDKKVEPKSC

SEQ ID NO: 639 - protein, 214 aa, synthetic construct; identical to SEQ ID NO: 635

SEQ ID NO: 640 - protein, 476 aa, synthetic construct
EVQLVESGGGLVQPGGSLKLSCAASGFTFNKYAMNWVRQAPGKGLEWVARIRSKYNNYATYYADSVKDRFTISRDDSKNTAYLQMNNLKTEDTAVYYCVRHGNFGNSYISYWAYWGQGTLVTVSSGGGGSGGGGSGGGGSQTVVTQEPSLTVSPGGTVTLTCGSSTGAVTSGNYPNWVQQKPGQAPRGLIGGTKFLAPGTPARFSGSLLGGKAALTLSGVQPEDEAEYYCVLWYSNRWVFGGGTKLTVLGGGGSQVQLKQSGPGLVQPSQSLSITCTVSGFSLTNYGVHWVRQSPGKGLEWLGVIWSGGNTDYNTPFTSRLSINKDNSKSQVFFKMNSLQSQDTAIYYCARALTYYDYEFAYWGQGTLVTVSAASTKGPSVFPLAPSSKSTSGGTAALGCLVKDYFPEPVTVSWNSGALTSGVHTFPAVLQSSGLYSLSSVVTVPSSSLGTQTYICNVNHKPSNTKVDKKVEPKSC

SEQ ID NO: 641 - protein, 214 aa, synthetic construct; identical to SEQ ID NO: 635

SEQ ID NO: 642 - protein, 476 aa, synthetic construct; identical to SEQ ID NO: 640

SEQ ID NO: 643 - protein, 256 aa, synthetic construct
GGPCRSHIDVAKPICVGGGGSGGLSGRSDAGSPLGLAGSGGSDILLTQSPVILSVSPGERVSFSCRASQSIGTNIHWYQQRTNGSPRLLIKYASESISGIPSRFSGSGSGTDFTLSINSVESEDIADYYCQQNNNWPTTFGAGTKLELKRTVAAPSVFIFPPSDEQLKSGTASVVCLLNNFYPREAKVQWKVDNALQSGNSQESVTEQDSKDSTYSLSSTLTLSKADYEKHKVYACEVTHQGLSSPVTKSFNRGEC

SEQ ID NO: 644 - protein, 653 aa, synthetic construct
EVQLVESGGGLVQPGGSLRLSCAASGSTFYTAVMGWVRQAPGKGLEWVAAIRWTALTTSYADSVKGRFTISRDGAKTTLYLQMNSLRPEDTAVYYCAARGTLGLFTTADSYDYWGQGTLVTVSSGGGGSGGGSGGVYCGPEFDESVGCMGGGGSGGGLSGRSDAGSPLGLAGSGGGSEVQLVESGGGLVQPGGSLKLSCAASGFTFNKYAMNWVRQAPGKGLEWVARIRSKYNNYATYYADSVKDRFTISRDDSKNTAYLQMNNLKTEDTAVYYCVRHGNFGNSYISYWAYWGQGTLVTVSSGGGGSGGGGSGGGGSQTVVTQEPSLTVSPGGTVTLTCGSSTGAVTSGNYPNWVQQKPGQAPRGLIGGTKFLAPGTPARFSGSLLGGKAALTLSGVQPEDEAEYYCVLWYSNRWVFGGGTKLTVLGGGGSQVQLKQSGPGLVQPSQSLSITCTVSGFSLTNYGVHWVRQSPGKGLEWLGVIWSGGNTDYNTPFTSRLSINKDNSKSQVFFKMNSLQSNDTAIYYCARALTYYDYEFAYWGQGTLVTVSAASTKGPSVFPLAPSSKSTSGGTAALGCLVKDYFPEPVTVSWNSGALTSGVHTFPAVLQSSGLYSLSSVVTVPSSSLGTQTYICNVNHKPSNTKVDKKVEPKSC

SEQ ID NO: 645 - protein, 14 aa, synthetic construct
PCRSHIDVAKPICV

SEQ ID NO: 646 - protein, 14 aa, synthetic construct
PCLFHFDPAKPICS

SEQ ID NO: 647 - protein, 8 aa, synthetic construct
GFAFSRYG

SEQ ID NO: 648 - protein, 8 aa, synthetic construct
IWYDGSNK

SEQ ID NO: 649 - protein, 16 aa, synthetic construct
ARGGDFLYYYYYGMDV

SEQ ID NO: 650 - protein, 6 aa, synthetic construct
QGISNY

SEQ ID NO: 651 - skipped

SEQ ID NO: 652 - protein, 9 aa, synthetic construct
QNYNSAPFT

SEQ ID NO: 653 - protein, 214 aa, synthetic construct; identical to SEQ ID NO: 19

SEQ ID NO: 654 - protein, 226 aa, synthetic construct; identical to SEQ ID NO: 20

SEQ ID NO: 655 - protein, 468 aa, synthetic construct
EVQLVESGGGLVQPGGSLKLSCAASGFTFNKYAMNWVRQAPGKGLEWVARIRSKYNNYATYYADSVKDRFTISRDDSKNTAYLQMNNLKTEDTAVYYCVRHGNFGNSYISYWAYWGQGTLVTVSSGGGGSGGGGSGGGGSQTVVTQEPSLTVSPGGTVTLTCGSSTGAVTSGNYPNWVQQKPGQAPRGLIGGTKFLAPGTPARFSGSLLGGKAALTLSGVQPEDEAEYYCVLWYSNRWVFGGGTKLTVLGGGGSDIQMTQSPSSLSASVGDRVTITCRASQGISNYLAWYQQKTGKVPKFLIYEASTLQSGVPSRFSGGGSGTDFTLTISSLQPEDVATYYCQNYNSAPFTFGPGTKVDIKRTVAAPSVFIFPPSDEQLKSGTASVVCLLNNFYPREAKVQWKVDNALQSGNSQESVTEQDSKDSTYSLSSTLTLSKADYEKHKVYACEVTHQGLSSPVTKSFNRGEC

SEQ ID NO: 656 - protein, 226 aa, synthetic construct; identical to SEQ ID NO: 20

SEQ ID NO: 657 - protein, 645 aa, synthetic construct
EVQLVESGGGLVQPGGSLRLSCAASGSTFYTAVMGWVRQAPGKGLEWVAAIRWTALTTSYADSVKGRFTISRDGAKTTLYLQMNSLRPEDTAVYYCAARGTLGLFTTADSYDYWGQGTLVTVSSGGGGSGGGSGGVYCGPEFDESVGCMGGGGSGGGLSGRSDAGSPLGLAGSGGGSEVQLVESGGGLVQPGGSLKLSCAASGFTFNKYAMNWVRQAPGKGLEWVARIRSKYNNYATYYADSVKDRFTISRDDSKNTAYLQMNNLKTEDTAVYYCVRHGNFGNSYISYWAYWGQGTLVTVSSGGGGSGGGGSGGGGSQTVVTQEPSLTVSPGGTVTLTCGSSTGAVTSGNYPNWVQQKPGQAPRGLIGGTKFLAPGTPARFSGSLLGGKAALTLSGVQPEDEAEYYCVLWYSNRWVFGGGTKLTVLGGGGSDIQMTQSPSSLSASVGDRVTITCRASQGISNYLAWYQQKTGKVPKFLIYEASTLQSGVPSRFSGGGSGTDFTLTISSLQPEDVATYYCQNYNSAPFTFGPGTKVDIKRTVAAPSVFIFPPSDEQLKSGTASVVCLLNNFYPREAKVQWKVDNALQSGNSQESVTEQDSKDSTYSLSSTLTLSKADYEKHKVYACEVTHQGLSSPVTKSFNRGEC

SEQ ID NO: 658 - protein, 226 aa, synthetic construct; identical to SEQ ID NO: 20

SEQ ID NO: 659 - protein, 8 aa, synthetic construct
GYTFTNYG

SEQ ID NO: 660 - protein, 8 aa, synthetic construct
INTYTGEP

SEQ ID NO: 661 - protein, 14 aa, synthetic construct
ARGGFGSSYWYFDV

SEQ ID NO: 662 - protein, 14 aa, synthetic construct
ARGGFGSSYWYADV

SEQ ID NO: 663 - protein, 14 aa, synthetic construct
ARGGFGSSYWYFAV

SEQ ID NO: 664 - protein, 6 aa, synthetic construct
QDVSIA

SEQ ID NO: 665 - skipped

SEQ ID NO: 666 - protein, 9 aa, synthetic construct
QQHYITPLT

SEQ ID NO: 667 - protein, 214 aa, synthetic construct
DIQLTQSPSSLSASVGDRVSITCKASQDVSIAVAWYQQKPGKAPKLLIYSASYRYTGVPDRFSGSGSGTDFTLTISSLQPEDFAVYYCQQHYITPLTFGAGTKVEIKRTVAAPSVFIFPPSDEQLKSGTASVVCLLNNFYPREAKVQWKVDNALQSGNSQESVTEQDSKDSTYSLSSTLTLSKADYEKHKVYACEVTHQGLSSPVTKSFNRGEC

SEQ ID NO: 668 - protein, 224 aa, synthetic construct
QVQLQQSGSELKKPGASVKVSCKASGYTFTNYGMNWVKQAPGQGLKWMGWINTYTGEPTYTDDFKGRFAFSLDTSVSTAYLQISSLKADDTAVYFCARGGFGSSYWYFDVWGQGSLVTVSSASTKGPSVFPLAPSSKSTSGGTAALGCLVKDYFPEPVTVSWNSGALTSGVHTFPAVLQSSGLYSLSSVVTVPSSSLGTQTYICNVNHKPSNTKVDKKVEPKSC

SEQ ID NO: 669 - protein, 214 aa, synthetic construct; identical to SEQ ID NO: 667

SEQ ID NO: 670 - protein, 224 aa, synthetic construct
QVQLQQSGSELKKPGASVKVSCKASGYTFTNYGMNWVKQAPGQGLKWMGWINTYTGEPTYTDDFKGRFAFSLDTSVSTAYLQISSLKADDTAVYFCARGGFGSSYWYADVWGQGSLVTVSSASTKGPSVFPLAPSSKSTSGGTAALGCLVKDYFPEPVTVSWNSGALTSGVHTFPAVLQSSGLYSLSSVVTVPSSSLGTQTYICNVNHKPSNTKVDKKVEPKSC

SEQ ID NO: 671 - protein, 214 aa, synthetic construct; identical to SEQ ID NO: 667

SEQ ID NO: 672 - protein, 224 aa, synthetic construct
QVQLQQSGSELKKPGASVKVSCKASGYTFTNYGMNWVKQAPGQGLKWMGWINTYTGEPTYTDDFKGRFAFSLDTSVSTAYLQISSLKADDTAVYFCARGGFGSSYWYFAVWGQGSLVTVSSASTKGPSVFPLAPSSKSTSGGTAALGCLVKDYFPEPVTVSWNSGALTSGVHTFPAVLQSSGLYSLSSVVTVPSSSLGTQTYICNVNHKPSNTKVDKKVEPKSC

SEQ ID NO: 673 - protein, 214 aa, synthetic construct; identical to SEQ ID NO: 667

SEQ ID NO: 674 - protein, 478 aa, synthetic construct
EVQLVESGGGLVQPGGSLKLSCAASGFTFNKYAMNWVRQAPGKGLEWVARIRSKYNNYATYYADSVKDRFTISRDDSKNTAYLQMNNLKTEDTAVYYCVRHGNFGNSYISYWAYWGQGTLVTVSSGGGGSGGGGSGGGGSQTVVTQEPSLTVSPGGTVTLTCGSSTGAVTSGNYPNWVQQKPGQAPRGLIGGTKFLAPGTPARFSGSLLGGKAALTLSGVQPEDEAEYYCVLWYSNRWVFGGGTKLTVLGGGGSQVQLQQSGSELKKPGASVKVSCKASGYTFTNYGMNWVKQAPGQGLKWMGWINTYTGEPTYTDDFKGRFAFSLDTSVSTAYLQISSLKADDTAVYFCARGGFGSSYWYFDVWGQGSLVTVSSASTKGPSVFPLAPSSKSTSGGTAALGCLVKDYFPEPVTVSWNSGALTSGVHTFPAVLQSSGLYSLSSVVTVPSSSLGTQTYICNVNHKPSNTKVDKKVEPKSC

SEQ ID NO: 675 - protein, 214 aa, synthetic construct; identical to SEQ ID NO: 667

SEQ ID NO: 676 - protein, 478 aa, synthetic construct
EVQLVESGGGLVQPGGSLKLSCAASGFTFNKYAMNWVRQAPGKGLEWVARIRSKYNNYATYYADSVKDRFTISRDDSKNTAYLQMNNLKTEDTAVYYCVRHGNFGNSYISYWAYWGQGTLVTVSSGGGGSGGGGSGGGGSQTVVTQEPSLTVSPGGTVTLTCGSSTGAVTSGNYPNWVQQKPGQAPRGLIGGTKFLAPGTPARFSGSLLGGKAALTLSGVQPEDEAEYYCVLWYSNRWVFGGGTKLTVLGGGGSQVQLQQSGSELKKPGASVKVSCKASGYTFTNYGMNWVKQAPGQGLKWMGWINTYTGEPTYTDDFKGRFAFSLDTSVSTAYLQISSLKADDTAVYFCARGGFGSSYWYADVWGQGSLVTVSSASTKGPSVFPLAPSSKSTSGGTAALGCLVKDYFPEPVTVSWNSGALTSGVHTFPAVLQSSGLYSLSSVVTVPSSSLGTQTYICNVNHKPSNTKVDKKVEPKSC

SEQ ID NO: 677 - protein, 214 aa, synthetic construct; identical to SEQ ID NO: 667

SEQ ID NO: 678 - protein, 478 aa, synthetic construct
EVQLVESGGGLVQPGGSLKLSCAASGFTFNKYAMNWVRQAPGKGLEWVARIRSKYNNYATYYADSVKDRFTISRDDSKNTAYLQMNNLKTEDTAVYYCVRHGNFGNSYISYWAYWGQGTLVTVSSGGGGSGGGGSGGGGSQTVVTQEPSLTVSPGGTVTLTCGSSTGAVTSGNYPNWVQQKPGQAPRGLIGGTKFLAPGTPARFSGSLLGGKAALTLSGVQPEDEAEYYCVLWYSNRWVFGGGTKLTVLGGGGSQVQLQQSGSELKKPGASVKVSCKASGYTFTNYGMNWVKQAPGQGLKWMGWINTYTGEPTYTDDFKGRFAFSLDTSVSTAYLQISSLKADDTAVYFCARGGFGSSYWYFAVWGQGSLVTVSSASTKGPSVFPLAPSSKSTSGGTAALGCLVKDYFPEPVTVSWNSGALTSGVHTFPAVLQSSGLYSLSSVVTVPSSSLGTQTYICNVNHKPSNTKVDKKVEPKSC

SEQ ID NO: 679 - protein, 256 aa, synthetic construct
GGVDFCGLYHWPICYQGGGGSGGLSGRSDAGSPLGLAGSGGSDIQLTQSPSSLSASVGDRVSITCKASQDVSIAVAWYQQKPGKAPKLLIYSASYRYTGVPDRFSGSGSGTDFTLTISSLQPEDFAVYYCQQHYITPLTFGAGTKVEIKRTVAAPSVFIFPPSDEQLKSGTASVVCLLNNFYPREAKVQWKVDNALQSGNSQESVTEQDSKDSTYSLSSTLTLSKADYEKHKVYACEVTHQGLSSPVTKSFNRGEC

SEQ ID NO: 680 - protein, 655 aa, synthetic construct
EVQLVESGGGLVQPGGSLRLSCAASGSTFYTAVMGWVRQAPGKGLEWVAAIRWTALTTSYADSVKGRFTISRDGAKTTLYLQMNSLRPEDTAVYYCAARGTLGLFTTADSYDYWGQGTLVTVSSGGGGSGGGSGGVYCGPEFDESVGCMGGGGSGGGLSGRSDAGSPLGLAGSGGGSEVQLVESGGGLVQPGGSLKLSCAASGFTFNKYAMNWVRQAPGKGLEWVARIRSKYNNYATYYADSVKDRFTISRDDSKNTAYLQMNNLKTEDTAVYYCVRHGNFGNSYISYWAYWGQGTLVTVSSGGGGSGGGGSGGGGSQTVVTQEPSLTVSPGGTVTLTCGSSTGAVTSGNYPNWVQQKPGQAPRGLIGGTKFLAPGTPARFSGSLLGGKAALTLSGVQPEDEAEYYCVLWYSNRWVFGGGTKLTVLGGGGSQVQLQQSGSELKKPGASVKVSCKASGYTFTNYGMNWVKQAPGQGLKWMGWINTYTGEPTYTDDFKGRFAFSLDTSVSTAYLQISSLKADDTAVYFCARGGFGSSYWYFAVWGQGSLVTVSSASTKGPSVFPLAPSSKSTSGGTAALGCLVKDYFPEPVTVSWNSGALTSGVHTFPAVLQSSGLYSLSSVVTVPSSSLGTQTYICNVNHKPSNTKVDKKVEPKSC

SEQ ID NO: 681 - protein, 256 aa, synthetic construct
GGVDFCALYHWPICYQGGGGSGGLSGRSDAGSPLGLAGSGGSDIQLTQSPSSLSASVGDRVSITCKASQDVSIAVAWYQQKPGKAPKLLIYSASYRYTGVPDRFSGSGSGTDFTLTISSLQPEDFAVYYCQQHYITPLTFGAGTKVEIKRTVAAPSVFIFPPSDEQLKSGTASVVCLLNNFYPREAKVQWKVDNALQSGNSQESVTEQDSKDSTYSLSSTLTLSKADYEKHKVYACEVTHQGLSSPVTKSFNRGEC

SEQ ID NO: 682 - protein, 655 aa, synthetic construct
EVQLVESGGGLVQPGGSLRLSCAASGSTFYTAVMGWVRQAPGKGLEWVAAIRWTALTTSYADSVKGRFTISRDGAKTTLYLQMNSLRPEDTAVYYCAARGTLGLFTTADSYDYWGQGTLVTVSSGGGGSGGGSGGVYCGPEFDESVGCMGGGGSGGGLSGRSDAGSPLGLAGSGGGSEVQLVESGGGLVQPGGSLKLSCAASGFTFNKYAMNWVRQAPGKGLEWVARIRSKYNNYATYYADSVKDRFTISRDDSKNTAYLQMNNLKTEDTAVYYCVRHGNFGNSYISYWAYWGQGTLVTVSSGGGGSGGGGSGGGGSQTVVTQEPSLTVSPGGTVTLTCGSSTGAVTSGNYPNWVQQKPGQAPRGLIGGTKFLAPGTPARFSGSLLGGKAALTLSGVQPEDEAEYYCVLWYSNRWVFGGGTKLTVLGGGGSQVQLQQSGSELKKPGASVKVSCKASGYTFTNYGMNWVKQAPGQGLKWMGWINTYTGEPTYTDDFKGRFAFSLDTSVSTAYLQISSLKADDTAVYFCARGGFGSSYWYADVWGQGSLVTVSSASTKGPSVFPLAPSSKSTSGGTAALGCLVKDYFPEPVTVSWNSGALTSGVHTFPAVLQSSGLYSLSSVVTVPSSSLGTQTYICNVNHKPSNTKVDKKVEPKSC

SEQ ID NO: 683 - protein, 256 aa, synthetic construct; identical to SEQ ID NO: 679

SEQ ID NO: 684 - protein, 655 aa, synthetic construct
EVQLVESGGGLVQPGGSLRLSCAASGSTFYTAVMGWVRQAPGKGLEWVAAIRWTALTTSYADSVKGRFTISRDGAKTTLYLQMNSLRPEDTAVYYCAARGTLGLFTTADSYDYWGQGTLVTVSSGGGGSGGGSGGVYCGPEFDESVGCAGGGGSGGGLSGRSDAGSPLGLAGSGGGSEVQLVESGGGLVQPGGSLKLSCAASGFTFNKYAMNWVRQAPGKGLEWVARIRSKYNNYATYYADSVKDRFTISRDDSKNTAYLQMNNLKTEDTAVYYCVRHGNAGNSYISYWAYWGQGTLVTVSSGGGGSGGGGSGGGGSQTVVTQEPSLTVSPGGTVTLTCGSSTGAVTSGNYPNWVQQKPGQAPRGLIGGTKFLAPGTPARFSGSLLGGKAALTLSGVQPEDEAEYYCVLWYSNRWVFGGGTKLTVLGGGGSQVQLQQSGSELKKPGASVKVSCKASGYTFTNYGMNWVKQAPGQGLKWMGWINTYTGEPTYTDDFKGRFAFSLDTSVSTAYLQISSLKADDTAVYFCARGGFGSSYWYFAVWGQGSLVTVSSASTKGPSVFPLAPSSKSTSGGTAALGCLVKDYFPEPVTVSWNSGALTSGVHTFPAVLQSSGLYSLSSVVTVPSSSLGTQTYICNVNHKPSNTKVDKKVEPKSC

SEQ ID NO: 685 - protein, 256 aa, synthetic construct; identical to SEQ ID NO: 679

SEQ ID NO: 686 - protein, 655 aa, synthetic construct
EVQLVESGGGLVQPGGSLRLSCAASGSTFYTAVMGWVRQAPGKGLEWVAAIRWTALTTSYADSVKGRFTISRDGAKTTLYLQMNSLRPEDTAVYYCAARGTLGLFTTADSYDYWGQGTLVTVSSGGGGSGGGSGGVYCGPEFDESVGCAGGGGSGGGLSGRSDAGSPLGLAGSGGGSEVQLVESGGGLVQPGGSLKLSCAASGFTFQKYAMNWVRQAPGKGLEWVARIRSKYNNYATYYADSVKDRFTISRDDSKNTAYLQMNNLKTEDTAVYYCVRHGNFGNSYVSYWAYWGQGTLVTVSSGGGGSGGGGSGGGGSQTVVTQEPSLTVSPGGTVTLTCGSSTGAVTSANYPNWVQQKPGQAPRGLIGGTKFLAPGTPARFSGSLLGGKAALTLSGVQPEDEAEYYCALWYSNRWVFGGGTKLTVLGGGGSQVQLQQSGSELKKPGASVKVSCKASGYTFTNYGMNWVKQAPGQGLKWMGWINTYTGEPTYTDDFKGRFAFSLDTSVSTAYLQISSLKADDTAVYFCARGGFGSSYWYFAVWGQGSLVTVSSASTKGPSVFPLAPSSKSTSGGTAALGCLVKDYFPEPVTVSWNSGALTSGVHTFPAVLQSSGLYSLSSVVTVPSSSLGTQTYICNVNHKPSNTKVDKKVEPKSC

SEQ ID NO: 687 - protein, 256 aa, synthetic construct; identical to SEQ ID NO: 681

SEQ ID NO: 688 - protein, 655 aa, synthetic construct
EVQLVESGGGLVQPGGSLRLSCAASGSTFYTAVMGWVRQAPGKGLEWVAAIRWTALTTSYADSVKGRFTISRDGAKTTLYLQMNSLRPEDTAVYYCAARGTLGLFTTADSYDYWGQGTLVTVSSGGGGSGGGSGGVYCGPEFDESVGCAGGGGSGGGLSGRSDAGSPLGLAGSGGGSEVQLVESGGGLVQPGGSLKLSCAASGFTFNKYAMNWVRQAPGKGLEWVARIRSKYNNYATYYADSVKDRFTISRDDSKNTAYLQMNNLKTEDTAVYYCVRHGNAGNSYISYWAYWGQGTLVTVSSGGGGSGGGGSGGGGSQTVVTQEPSLTVSPGGTVTLTCGSSTGAVTSGNYPNWVQQKPGQAPRGLIGGTKFLAPGTPARFSGSLLGGKAALTLSGVQPEDEAEYYCVLWYSNRWVFGGGTKLTVLGGGGSQVQLQQSGSELKKPGASVKVSCKASGYTFTNYGMNWVKQAPGQGLKWMGWINTYTGEPTYTDDFKGRFAFSLDTSVSTAYLQISSLKADDTAVYFCARGGFGSSYWYADVWGQGSLVTVSSASTKGPSVFPLAPSSKSTSGGTAALGCLVKDYFPEPVTVSWNSGALTSGVHTFPAVLQSSGLYSLSSVVTVPSSSLGTQTYICNVNHKPSNTKVDKKVEPKSC

SEQ ID NO: 689 - protein, 256 aa, synthetic construct; identical to SEQ ID NO: 681

SEQ ID NO: 690 - protein, 655 aa, synthetic construct
EVQLVESGGGLVQPGGSLRLSCAASGSTFYTAVMGWVRQAPGKGLEWVAAIRWTALTTSYADSVKGRFTISRDGAKTTLYLQMNSLRPEDTAVYYCAARGTLGLFTTADSYDYWGQGTLVTVSSGGGGSGGGSGGVYCGPEFDESVGCAGGGGSGGGLSGRSDAGSPLGLAGSGGGSEVQLVESGGGLVQPGGSLKLSCAASGFTFQKYAMNWVRQAPGKGLEWVARIRSKYNNYATYYADSVKDRFTISRDDSKNTAYLQMNNLKTEDTAVYYCVRHGNFGNSYVSYWAYWGQGTLVTVSSGGGGSGGGGSGGGGSQTVVTQEPSLTVSPGGTVTLTCGSSTGAVTSANYPNWVQQKPGQAPRGLIGGTKFLAPGTPARFSGSLLGGKAALTLSGVQPEDEAEYYCALWYSNRWVFGGGTKLTVLGGGGSQVQLQQSGSELKKPGASVKVSCKASGYTFTNYGMNWVKQAPGQGLKWMGWINTYTGEPTYTDDFKGRFAFSLDTSVSTAYLQISSLKADDTAVYFCARGGFGSSYWYADVWGQGSLVTVSSASTKGPSVFPLAPSSKSTSGGTAALGCLVKDYFPEPVTVSWNSGALTSGVHTFPAVLQSSGLYSLSSVVTVPSSSLGTQTYICNVNHKPSNTKVDKKVEPKSC

SEQ ID NO: 691 - protein, 256 aa, synthetic construct; identical to SEQ ID NO: 681

SEQ ID NO: 692 - protein, 655 aa, synthetic construct
EVQLVESGGGLVQPGGSLRLSCAASGSTFYTAVMGWVRQAPGKGLEWVAAIRWTALTTSYADSVKGRFTISRDGAKTTLYLQMNSLRPEDTAVYYCAARGTLGLFTTADSYDYWGQGTLVTVSSGGGGSGGGSGGVYCGPEFDESVGCAGGGGSGGGLSGRSDAGSPLGLAGSGGGSEVQLVESGGGLVQPGGSLKLSCAASGFTFNKYAMNWVRQAPGKGLEWVARIRSKYNNYATYYADSVKDRFTISRDDSKNTAYLQMNNLKTEDTAVYYCVRAGNFGNSYISYWAYWGQGTLVTVSSGGGGSGGGGSGGGGSQTVVTQEPSLTVSPGGTVTLTCGSSTGAVTSGNYPNWVQQKPGQAPRGLIGGTKFLAPGTPARFSGSLLGGKAALTLSGVQPEDEAEYYCVLWYSNRWVFGGGTKLTVLGGGGSQVQLQQSGSELKKPGASVKVSCKASGYTFTNYGMNWVKQAPGQGLKWMGWINTYTGEPTYTDDFKGRFAFSLDTSVSTAYLQISSLKADDTAVYFCARGGFGSSYWYADVWGQGSLVTVSSASTKGPSVFPLAPSSKSTSGGTAALGCLVKDYFPEPVTVSWNSGALTSGVHTFPAVLQSSGLYSLSSVVTVPSSSLGTQTYICNVNHKPSNTKVDKKVEPKSC

SEQ ID NO: 693 - protein, 13 aa, synthetic construct
IDFCMLYNWPICA

SEQ ID NO: 694 - protein, 14 aa, synthetic construct
VDFCGLYHWPICYQ

SEQ ID NO: 695 - protein, 14 aa, synthetic construct
VDFCALYHWPICYQ

SEQ ID NO: 696 - protein, 214 aa, synthetic construct
DIQMTQSPSSLSASVGDRVTITCHASQNIYVWLNWYQQKPGKAPKLLIYKASNLHTGVPSRFSGSGSGTDFTLTISSLQPEDFATYYCQQGQTYPYTFGGGTKVEIKRTVAAPSVFIFPPSDEQLKSGTASVVCLLNNFYPREAKVQWKVDNALQSGNSQESVTEQDSKDSTYSLSSTLTLSKADYEKHKVYACEVTHQGLSSPVTKSFNRGEC

SEQ ID NO: 697 - protein, 223 aa, synthetic construct
QVQLVQSGAEVKKPGASVKVSCKASGYTFTSYYIHWVRQAPGQGLEWIGSIYPGNVNTNYNEKFKDRATLTVDTSISTAYMELSRLRSDDTAVYFCTRSHYGLDWNFDVWGQGTTVTVSSASTKGPSVFPLAPSSKSTSGGTAALGCLVKDYFPEPVTVSWNSGALTSGVHTFPAVLQSSGLYSLSSVVTVPSSSLGTQTYICNVNHKPSNTKVDKKVEPKSC

SEQ ID NO: 698 - protein, 212 aa, synthetic construct
DIQMTQSPSSLSASVGDRVTITCHASQNIYVWLNWYQQKPGKAPKLLIYKASNLHTGVPSRFSGSGSGTDFTLTISSLQPEDFATYYCQQGQTYPYTFGGGTKVEIKSSASTKGPSVFPLAPSSKSTSGGTAALGCLVKDYFPEPVTVSWNSGALTSGVHTFPAVLQSSGLYSLSSVVTVPSSSLGTQTYICNVNHKPSNTKVDKKVEPKSC

SEQ ID NO: 699 - protein, 227 aa, synthetic construct
QVQLVQSGAEVKKPGASVKVSCKASGYTFTSYYIHWVRQAPGQGLEWIGSIYPGNVNTNYNEKFKDRATLTVDTSISTAYMELSRLRSDDTAVYFCTRSHYGLDWNFDVWGQGTTVTVSSASVAAPSVFIFPPSDEQLKSGTASVVCLLNNFYPREAKVQWKVDNALQSGNSQESVTEQDSKDSTYSLSSTLTLSKADYEKHKVYACEVTHQGLSSPVTKSFNRGEC

SEQ ID NO: 700 - protein, 212 aa, synthetic construct
DIQMTQSPSSLSASVGDRVTITCHASQNIYVWLNWYQQKPGKAPKLLIYKASNLHTGVPSRFSGSGSGTDFTLTISSLQPEDFATYYCQQGQTYPYTFGGGTKVEIKSSASTKGPSVFPLAPSSKSTSGGTAALGCLVEDYFPEPVTVSWNSGALTSGVHTFPAVLQSSGLYSLSSVVTVPSSSLGTQTYICNVNHKPSNTKVDEKVEPKSC

SEQ ID NO: 701 - protein, 227 aa, synthetic construct
QVQLVQSGAEVKKPGASVKVSCKASGYTFTSYYIHWVRQAPGQGLEWIGSIYPGNVNTNYNEKFKDRATLTVDTSISTAYMELSRLRSDDTAVYFCTRSHYGLDWNFDVWGQGTTVTVSSASVAAPSVFIFPPSDRKLKSGTASVVCLLNNFYPREAKVQWKVDNALQSGNSQESVTEQDSKDSTYSLSSTLTLSKADYEKHKVYACEVTHQGLSSPVTKSFNRGEC

SEQ ID NO: 702 - protein, 214 aa, synthetic construct; identical to SEQ ID NO: 19

SEQ ID NO: 703 - protein, 226 aa, synthetic construct
QVQLVESGGGVVQPGRSLSLSCAASGFAFSRYGMHWVRQAPGKGLEWVAVIWYDGSNKYYADSVKGRFTISRDNSKNTQYLQMNSLRAEDTAVYYCARGGDFLYYYYYGMDVWGQGTTVTVSSASTKGPSVFPLAPSSKSTSGGTAALGCLVKDYFPEPVTVSWNSGALTSGVHTFPAVLQSSGLYSLSSVVTVPSSSLGTQTYICNVNHKPSNTKVDKKVEPKSC

SEQ ID NO: 704 - protein, 214 aa, synthetic construct
DIQMTQSPSSLSASVGDRVTITCRASQGISNYLAWYQQKTGKVPKFLIYEASTLQSGVPSRFSGGGSGTDFTLTISSLQPEDVATYYCQNYNSAPFTFGPGTKVDIKRTVAAPSVFIFPPSDRKLKSGTASVVCLLNNFYPREAKVQWKVDNALQSGNSQESVTEQDSKDSTYSLSSTLTLSKADYEKHKVYACEVTHQGLSSPVTKSFNRGEC

SEQ ID NO: 705 - protein, 226 aa, synthetic construct
QVQLVESGGGVVQPGRSLSLSCAASGFAFSRYGMHWVRQAPGKGLEWVAVIWYDGSNKYYADSVKGRFTISRDNSKNTQYLQMNSLRAEDTAVYYCARGGDFLYYYYYGMDVWGQGTTVTVSSASTKGPSVFPLAPSSKSTSGGTAALGCLVEDYFPEPVTVSWNSGALTSGVHTFPAVLQSSGLYSLSSVVTVPSSSLGTQTYICNVNHKPSNTKVDEKVEPKSC

SEQ ID NO: 706 - protein, 461 aa, synthetic construct; identical to SEQ ID NO: 25

SEQ ID NO: 707 - protein, 226 aa, synthetic construct; identical to SEQ ID NO: 703

SEQ ID NO: 708 - protein, 227 aa, synthetic construct; identical to SEQ ID NO: 701

SEQ ID NO: 709 - protein, 437 aa, synthetic construct
DIQMTQSPSSLSASVGDRVTITCHASQNIYVWLNWYQQKPGKAPKLLIYKASNLHTGVPSRFSGSGSGTDFTLTISSLQPEDFATYYCQQGQTYPYTFGGGTKVEIKSSASTKGPSVFPLAPSSKSTSGGTAALGCLVEDYFPEPVTVSWNSGALTSGVHTFPAVLQSSGLYSLSSVVTVPSSSLGTQTYICNVNHKPSNTKVDEKVEPKSCDGGGGSGGGGSDIQMTQSPSSLSASVGDRVTITCRASQGISNYLAWYQQKTGKVPKFLIYEASTLQSGVPSRFSGGGSGTDFTLTISSLQPEDVATYYCQNYNSAPFTFGPGTKVDIKRTVAAPSVFIFPPSDEQLKSGTASVVCLLNNFYPREAKVQWKVDNALQSGNSQESVTEQDSKDSTYSLSSTLTLSKADYEKHKVYACEVTHQGLSSPVTKSFNRGEC

SEQ ID NO: 710 - protein, 226 aa, synthetic construct; identical to SEQ ID NO: 703

SEQ ID NO: 711 - protein, 212 aa, synthetic construct; identical to SEQ ID NO: 700

SEQ ID NO: 712 - protein, 452 aa, synthetic construct
QVQLVQSGAEVKKPGASVKVSCKASGYTFTSYYIHWVRQAPGQGLEWIGSIYPGNVNTNYNEKFKDRATLTVDTSISTAYMELSRLRSDDTAVYFCTRSHYGLDWNFDVWGQGTTVTVSSASVAAPSVFIFPPSDRKLKSGTASVVCLLNNFYPREAKVQWKVDNALQSGNSQESVTEQDSKDSTYSLSSTLTLSKADYEKHKVYACEVTHQGLSSPVTKSFNRGECDGGGGSGGGGSDIQMTQSPSSLSASVGDRVTITCRASQGISNYLAWYQQKTGKVPKFLIYEASTLQSGVPSRFSGGGSGTDFTLTISSLQPEDVATYYCQNYNSAPFTFGPGTKVDIKRTVAAPSVFIFPPSDEQLKSGTASVVCLLNNFYPREAKVQWKVDNALQSGNSQESVTEQDSKDSTYSLSSTLTLSKADYEKHKVYACEVTHQGLSSPVTKSFNRGEC

SEQ ID NO: 713 - protein, 226 aa, synthetic construct; identical to SEQ ID NO: 703

SEQ ID NO: 714 - protein, 212 aa, synthetic construct; identical to SEQ ID NO: 700

SEQ ID NO: 715 - protein, 464 aa, synthetic construct
QVQLVQSGAEVKKPGASVKVSCKASGYTFTSYYIHWVRQAPGQGLEWIGSIYPGNVNTNYNEKFKDRATLTVDTSISTAYMELSRLRSDDTAVYFCTRSHYGLDWNFDVWGQGTTVTVSSASVAAPSVFIFPPSDRKLKSGTASVVCLLNNFYPREAKVQWKVDNALQSGNSQESVTEQDSKDSTYSLSSTLTLSKADYEKHKVYACEVTHQGLSSPVTKSFNRGECDGGGGSGGGGSQVQLVESGGGVVQPGRSLSLSCAASGFAFSRYGMHWVRQAPGKGLEWVAVIWYDGSNKYYADSVKGRFTISRDNSKNTQYLQMNSLRAEDTAVYYCARGGDFLYYYYYGMDVWGQGTTVTVSSASTKGPSVFPLAPSSKSTSGGTAALGCLVKDYFPEPVTVSWNSGALTSGVHTFPAVLQSSGLYSLSSVVTVPSSSLGTQTYICNVNHKPSNTKVDKKVEPKSC

SEQ ID NO: 716 - protein, 214 aa, synthetic construct; identical to SEQ ID NO: 19

SEQ ID NO: 717 - protein, 227 aa, synthetic construct; identical to SEQ ID NO: 701

SEQ ID NO: 718 - protein, 449 aa, synthetic construct
DIQMTQSPSSLSASVGDRVTITCHASQNIYVWLNWYQQKPGKAPKLLIYKASNLHTGVPSRFSGSGSGTDFTLTISSLQPEDFATYYCQQGQTYPYTFGGGTKVEIKSSASTKGPSVFPLAPSSKSTSGGTAALGCLVEDYFPEPVTVSWNSGALTSGVHTFPAVLQSSGLYSLSSVVTVPSSSLGTQTYICNVNHKPSNTKVDEKVEPKSCDGGGGSGGGGSQVQLVESGGGVVQPGRSLSLSCAASGFAFSRYGMHWVRQAPGKGLEWVAVIWYDGSNKYYADSVKGRFTISRDNSKNTQYLQMNSLRAEDTAVYYCARGGDFLYYYYYGMDVWGQGTTVTVSSASTKGPSVFPLAPSSKSTSGGTAALGCLVKDYFPEPVTVSWNSGALTSGVHTFPAVLQSSGLYSLSSVVTVPSSSLGTQTYICNVNHKPSNTKVDKKVEPKSC

SEQ ID NO: 719 - protein, 214 aa, synthetic construct; identical to SEQ ID NO: 19

SEQ ID NO: 720 - protein, 212 aa, synthetic construct; identical to SEQ ID NO: 698

SEQ ID NO: 721 - protein, 452 aa, synthetic construct
QVQLVQSGAEVKKPGASVKVSCKASGYTFTSYYIHWVRQAPGQGLEWIGSIYPGNVNTNYNEKFKDRATLTVDTSISTAYMELSRLRSDDTAVYFCTRSHYGLDWNFDVWGQGTTVTVSSASVAAPSVFIFPPSDEQLKSGTASVVCLLNNFYPREAKVQWKVDNALQSGNSQESVTEQDSKDSTYSLSSTLTLSKADYEKHKVYACEVTHQGLSSPVTKSFNRGECDGGGGSGGGGSDIQMTQSPSSLSASVGDRVTITCRASQGISNYLAWYQQKTGKVPKFLIYEASTLQSGVPSRFSGGGSGTDFTLTISSLQPEDVATYYCQNYNSAPFTFGPGTKVDIKRTVAAPSVFIFPPSDRKLKSGTASVVCLLNNFYPREAKVQWKVDNALQSGNSQESVTEQDSKDSTYSLSSTLTLSKADYEKHKVYACEVTHQGLSSPVTKSFNRGEC

SEQ ID NO: 722 - protein, 226 aa, synthetic construct; identical to SEQ ID NO: 705

SEQ ID NO: 723 - protein, 227 aa, synthetic construct; identical to SEQ ID NO: 699

SEQ ID NO: 724 - protein, 449 aa, synthetic construct
DIQMTQSPSSLSASVGDRVTITCHASQNIYVWLNWYQQKPGKAPKLLIYKASNLHTGVPSRFSGSGSGTDFTLTISSLQPEDFATYYCQQGQTYPYTFGGGTKVEIKSSASTKGPSVFPLAPSSKSTSGGTAALGCLVKDYFPEPVTVSWNSGALTSGVHTFPAVLQSSGLYSLSSVVTVPSSSLGTQTYICNVNHKPSNTKVDKKVEPKSCDGGGGSGGGGSQVQLVESGGGVVQPGRSLSLSCAASGFAFSRYGMHWVRQAPGKGLEWVAVIWYDGSNKYYADSVKGRFTISRDNSKNTQYLQMNSLRAEDTAVYYCARGGDFLYYYYYGMDVWGQGTTVTVSSASTKGPSVFPLAPSSKSTSGGTAALGCLVEDYFPEPVTVSWNSGALTSGVHTFPAVLQSSGLYSLSSVVTVPSSSLGTQTYICNVNHKPSNTKVDEKVEPKSC

SEQ ID NO: 725 - protein, 214 aa, synthetic construct; identical to SEQ ID NO: 704

SEQ ID NO: 726 - protein, 452 aa, synthetic construct
DIQMTQSPSSLSASVGDRVTITCRASQGISNYLAWYQQKTGKVPKFLIYEASTLQSGVPSRFSGGGSGTDFTLTISSLQPEDVATYYCQNYNSAPFTFGPGTKVDIKRTVAAPSVFIFPPSDRKLKSGTASVVCLLNNFYPREAKVQWKVDNALQSGNSQESVTEQDSKDSTYSLSSTLTLSKADYEKHKVYACEVTHQGLSSPVTKSFNRGECDGGGGSGGGGSQVQLVQSGAEVKKPGASVKVSCKASGYTFTSYYIHWVRQAPGQGLEWIGSIYPGNVNTNYNEKFKDRATLTVDTSISTAYMELSRLRSDDTAVYFCTRSHYGLDWNFDVWGQGTTVTVSSASVAAPSVFIFPPSDEQLKSGTASVVCLLNNFYPREAKVQWKVDNALQSGNSQESVTEQDSKDSTYSLSSTLTLSKADYEKHKVYACEVTHQGLSSPVTKSFNRGEC

SEQ ID NO: 727 - protein, 226 aa, synthetic construct; identical to SEQ ID NO: 705

SEQ ID NO: 728 - protein, 212 aa, synthetic construct; identical to SEQ ID NO: 698

SEQ ID NO: 729 - protein, 214 aa, synthetic construct; identical to SEQ ID NO: 704

SEQ ID NO: 730 - protein, 449 aa, synthetic construct
QVQLVESGGGVVQPGRSLSLSCAASGFAFSRYGMHWVRQAPGKGLEWVAVIWYDGSNKYYADSVKGRFTISRDNSKNTQYLQMNSLRAEDTAVYYCARGGDFLYYYYYGMDVWGQGTTVTVSSASTKGPSVFPLAPSSKSTSGGTAALGCLVEDYFPEPVTVSWNSGALTSGVHTFPAVLQSSGLYSLSSVVTVPSSSLGTQTYICNVNHKPSNTKVDEKVEPKSCDGGGGSGGGGSDIQMTQSPSSLSASVGDRVTITCHASQNIYVWLNWYQQKPGKAPKLLIYKASNLHTGVPSRFSGSGSGTDFTLTISSLQPEDFATYYCQQGQTYPYTFGGGTKVEIKSSASTKGPSVFPLAPSSKSTSGGTAALGCLVKDYFPEPVTVSWNSGALTSGVHTFPAVLQSSGLYSLSSVVTVPSSSLGTQTYICNVNHKPSNTKVDKKVEPKSC

SEQ ID NO: 731 - protein, 227 aa, synthetic construct; identical to SEQ ID NO: 699

SEQ ID NO: 732 - protein, 14 aa, synthetic construct
YWSCFQIPFTCFYF

SEQ ID NO: 733 - protein, 14 aa, synthetic construct
WECLKYTEANACTY

SEQ ID NO: 734 - protein, 14 aa, synthetic construct
FMCLPQNPHPLCFK

SEQ ID NO: 735 - protein, 14 aa, synthetic construct
PDCQTILFKPWCVR

SEQ ID NO: 736 - protein, 14 aa, synthetic construct
ACDTYFAGMINECF

SEQ ID NO: 737 - protein, 14 aa, synthetic construct
GCQYPWAFDAMSCP

SEQ ID NO: 738 - protein, 14 aa, synthetic construct
WCWDYKLWVPTQCP

SEQ ID NO: 739 - protein, 14 aa, synthetic construct
WCWDYREWVPMTCP

SEQ ID NO: 740 - protein, 14 aa, synthetic construct
ECHWSMWAVGHACF

SEQ ID NO: 741 - protein, 14 aa, synthetic construct
YCAGHSPINIGKCL

SEQ ID NO: 742 - protein, 14 aa, synthetic construct
WCWDYKLWVPMTCP

SEQ ID NO: 743 - protein, 14 aa, synthetic construct
DCWWMFESYPGRCI

SEQ ID NO: 744 - protein, 14 aa, synthetic construct
YCAGHAWQYINKCL

SEQ ID NO: 745 - protein, 14 aa, synthetic construct
WCWYYREWVPMTCP

SEQ ID NO: 746 - protein, 14 aa, synthetic construct
YWYCSPSIVRCVLV

SEQ ID NO: 747 - protein, 14 aa, synthetic construct
PDCHTILFKPWCVR

SEQ ID NO: 748 - protein, 14 aa, synthetic construct
WICDKSGSIMLCRA

SEQ ID NO: 749 - protein, 14 aa, synthetic construct
SCAAGASYAWPYCL

SEQ ID NO: 750 - protein, 14 aa, synthetic construct
DCPWLSGFSRPLLC

SEQ ID NO: 751 - protein, 14 aa, synthetic construct
YCAGMSTIQLWLKC

SEQ ID NO: 752 - protein, 14 aa, synthetic construct
YCAGHMPQYEVKCL

SEQ ID NO: 753 - protein, 14 aa, synthetic construct
YCAGHTEEHYVKCM

SEQ ID NO: 754 - protein, 14 aa, synthetic construct
YCMGHSHEHIWKCL

SEQ ID NO: 755 - protein, 14 aa, synthetic construct
YCAGHSHEYLAKCE

SEQ ID NO: 756 - protein, 14 aa, synthetic construct
ACAAGASYAWPYCL

SEQ ID NO: 757 - protein, 14 aa, synthetic construct
SCAAAASYAWPYCL

SEQ ID NO: 758 - protein, 14 aa, synthetic construct
SCAAGAAYAWPYCL

SEQ ID NO: 759 - protein, 14 aa, synthetic construct
SCAAGASAAWPYCL

SEQ ID NO: 760 - protein, 14 aa, synthetic construct
SCAAGASYAAPYCL

SEQ ID NO: 761 - protein, 14 aa, synthetic construct
SCAAGASYAWAYCL

SEQ ID NO: 762 - protein, 14 aa, synthetic construct
SCAAGASYAWPACL

SEQ ID NO: 763 - protein, 14 aa, synthetic construct
SCAAGASYAWPYCA

SEQ ID NO: 764 - protein, 14 aa, synthetic construct
ACAGHAWQYINKCL

SEQ ID NO: 765 - protein, 14 aa, synthetic construct
YCAAHAWQYINKCL

SEQ ID NO: 766 - protein, 14 aa, synthetic construct
YCAGAAWQYINKCL

SEQ ID NO: 767 - protein, 14 aa, synthetic construct
YCAGHAAQYINKCL

SEQ ID NO: 768 - protein, 14 aa, synthetic construct
YCAGHAWAYINKCL

SEQ ID NO: 769 - protein, 14 aa, synthetic construct
YCAGHAWQAINKCL

SEQ ID NO: 770 - protein, 14 aa, synthetic construct
YCAGHAWQYANKCL

SEQ ID NO: 771 - protein, 14 aa, synthetic construct
YCAGHAWQYIAKCL

SEQ ID NO: 772 - protein, 14 aa, synthetic construct
YCAGHAWQYINACL

SEQ ID NO: 773 - protein, 14 aa, synthetic construct
YCAGHAWQYINKCA

SEQ ID NO: 774 - protein, 14 aa, synthetic construct
YCEGHSPEYILKCL

SEQ ID NO: 775 - protein, 14 aa, synthetic construct
YCEGHRPEYILKCL

SEQ ID NO: 776 - protein, 14 aa, synthetic construct
YCEGHEGIYFWKCL

SEQ ID NO: 777 - protein, 14 aa, synthetic construct
YCEGHLPEYIEKCL

SEQ ID NO: 778 - protein, 14 aa, synthetic construct
YCEGHAPEYIAKCL

SEQ ID NO: 779 - protein, 14 aa, synthetic construct
YCEGHAPEYIRKCL

SEQ ID NO: 780 - protein, 14 aa, synthetic construct
YCEGHAPEYIWKCL

SEQ ID NO: 781 - protein, 14 aa, synthetic construct
YCEGHSQENIWKCL

SEQ ID NO: 782 - protein, 14 aa, synthetic construct
YCEGHLPEYLGKCL

SEQ ID NO: 783 - protein, 14 aa, synthetic construct
YCEGHLPEYREKCL

SEQ ID NO: 784 - protein, 14 aa, synthetic construct
YCEGHLPEYLAKCL

SEQ ID NO: 785 - protein, 14 aa, synthetic construct
YCEGHSQEYLWKCL

SEQ ID NO: 786 - protein, 14 aa, synthetic construct
YCEGHSSEYIQKCL

SEQ ID NO: 787 - protein, 14 aa, synthetic construct
HCSGHHWLQVWKCF

SEQ ID NO: 788 - protein, 14 aa, synthetic construct
YCWSHSPPFIKKCY

SEQ ID NO: 789 - protein, 14 aa, synthetic construct
YCEGHLPEYRNKCL

SEQ ID NO: 790 - protein, 14 aa, synthetic construct
YCEGHLPEYLEKCV

SEQ ID NO: 791 - protein, 14 aa, synthetic construct
YCEGHLPEYIQKCL

SEQ ID NO: 792 - protein, 14 aa, synthetic construct
YCEGHLPEYIWKCL

SEQ ID NO: 793 - protein, 14 aa, synthetic construct
YCEGHAPEYIGKCL

SEQ ID NO: 794 - protein, 14 aa, synthetic construct
TCSAGATWPWPICL

SEQ ID NO: 795 - protein, 14 aa, synthetic construct
LCAAGASWPWPVCL

SEQ ID NO: 796 - protein, 14 aa, synthetic construct
TCSAGASYPWPLCL

SEQ ID NO: 797 - protein, 14 aa, synthetic construct
TCAAGAAWPWPQCL

SEQ ID NO: 798 - protein, 14 aa, synthetic construct
TCSAGATYTWPKCF

SEQ ID NO: 799 - protein, 14 aa, synthetic construct
TCAAGATWSWPACF

SEQ ID NO: 800 - protein, 14 aa, synthetic construct
TCAAGAAWGWPLCF

SEQ ID NO: 801 - protein, 14 aa, synthetic construct
LCAAGATYPWPLCL

SEQ ID NO: 802 - protein, 14 aa, synthetic construct
TCSAGAAYPWPLCL

SEQ ID NO: 803 - protein, 14 aa, synthetic construct
TCSAGAAYSWPACF

SEQ ID NO: 804 - protein, 14 aa, synthetic construct
LCAAGATYPWPTCL

SEQ ID NO: 805 - protein, 14 aa, synthetic construct
SCSAGAHYPWPQCF

SEQ ID NO: 806 - protein, 14 aa, synthetic construct
TCSAGATYEWPRCL

SEQ ID NO: 807 - protein, 14 aa, synthetic construct
TCSAGAHYPWPICL

SEQ ID NO: 808 - protein, 14 aa, synthetic construct
SCSAGAAYYWPWCL

SEQ ID NO: 809 - protein, 14 aa, synthetic construct
TCSAGATWAWPLCF

SEQ ID NO: 810 - protein, 14 aa, synthetic construct
TCAAGATYLWPTCL

SEQ ID NO: 811 - protein, 14 aa, synthetic construct
TCAAGAHYPWPACL

SEQ ID NO: 812 - protein, 14 aa, synthetic construct
LCAAGFTYPWPLCL

SEQ ID NO: 813 - protein, 14 aa, synthetic construct
LCKPGVPYKWPTCL

SEQ ID NO: 814 - protein, 14 aa, synthetic construct
YCDGHSPIYMWKCL

SEQ ID NO: 815 - protein, 14 aa, synthetic construct
YCEGHAPEYMAKCL

SEQ ID NO: 816 - protein, 14 aa, synthetic construct
YCDGHLPQYMEKCL

SEQ ID NO: 817 - protein, 14 aa, synthetic construct
YCAGHAPEYMEKCL

SEQ ID NO: 818 - protein, 14 aa, synthetic construct
YCDGHSPEYMWKCL

SEQ ID NO: 819 - protein, 14 aa, synthetic construct
YCDGHLPEYMEKCL

SEQ ID NO: 820 - protein, 14 aa, synthetic construct
YCEGHLPQYMWKCL

SEQ ID NO: 821 - protein, 14 aa, synthetic construct
YCDGHLPEYMNKCL

SEQ ID NO: 822 - protein, 14 aa, synthetic construct
YCAGHLPEYMDKCL

SEQ ID NO: 823 - protein, 14 aa, synthetic construct
YCDGHSAEHMAKCL

SEQ ID NO: 824 - protein, 14 aa, synthetic construct
YCAGHLPQYMAKCL

SEQ ID NO: 825 - protein, 14 aa, synthetic construct
YCEGHLPEYMAKCL

SEQ ID NO: 826 - protein, 14 aa, synthetic construct
YCEGHLPEYMFKCL

SEQ ID NO: 827 - protein, 14 aa, synthetic construct
YCDGHLPQYMAQCL

SEQ ID NO: 828 - protein, 14 aa, synthetic construct
YCEGHLPQYMQKCL

SEQ ID NO: 829 - protein, 14 aa, synthetic construct
YCDGHAPEYMMKCL

SEQ ID NO: 830 - protein, 14 aa, synthetic construct
YCEGHLPEYMWKCL

SEQ ID NO: 831 - protein, 14 aa, synthetic construct
YCEGHAAEYMAKCL

SEQ ID NO: 832 - protein, 14 aa, synthetic construct
YCDGHLPEYLAKCL

SEQ ID NO: 833 - protein, 14 aa, synthetic construct
YCAGHMPEYMAKCL

SEQ ID NO: 834 - protein, 14 aa, synthetic construct
YCDGHLPEYMSKCM

SEQ ID NO: 835 - protein, 14 aa, synthetic construct
YCEGHTAEYMQKCL

SEQ ID NO: 836 - protein, 14 aa, synthetic construct
YCMGHAPEYMAKCL

SEQ ID NO: 837 - protein, 14 aa, synthetic construct
YCDGHLPEYMAKCL

SEQ ID NO: 838 - protein, 14 aa, synthetic construct
YCDGHSWEYIGKCL

SEQ ID NO: 839 - protein, 14 aa, synthetic construct
YCDGHLPEYQEKCL

SEQ ID NO: 840 - protein, 14 aa, synthetic construct
YCAGHLPQYMSKCL

SEQ ID NO: 841 - protein, 14 aa, synthetic construct
YCDGHLPIYMSQCL

SEQ ID NO: 842 - protein, 14 aa, synthetic construct
YCEGHSPEYMAKCL

SEQ ID NO: 843 - protein, 14 aa, synthetic construct
YCDGHLPEYMSKCL

SEQ ID NO: 844 - protein, 14 aa, synthetic construct
YCDGHLPQYMAKCL

SEQ ID NO: 845 - protein, 14 aa, synthetic construct
YCQGHLPMYMAKCL

SEQ ID NO: 846 - protein, 14 aa, synthetic construct
YCDGHLPEYMMKCL

SEQ ID NO: 847 - protein, 14 aa, synthetic construct
YCDGHSPMYILKCL

SEQ ID NO: 848 - protein, 14 aa, synthetic construct
YCQGHLPMYMEKCL

SEQ ID NO: 849 - protein, 14 aa, synthetic construct
YCEGHLPQYMAKCL

SEQ ID NO: 850 - protein, 14 aa, synthetic construct
YCDGHSPLYMWKCL

SEQ ID NO: 851 - protein, 14 aa, synthetic construct
YCDGHLPMYMQKCL

SEQ ID NO: 852 - protein, 14 aa, synthetic construct
YCDGHLPIYMSKCL

SEQ ID NO: 853 - protein, 14 aa, synthetic construct
YCEGHSWANLGKCL

SEQ ID NO: 854 - protein, 14 aa, synthetic construct
YCDGHLPEYREKCF

SEQ ID NO: 855 - protein, 14 aa, synthetic construct
YCEGHLPEYMLKCL

SEQ ID NO: 856 - protein, 14 aa, synthetic construct
YCDGHEPQYMLKCL

SEQ ID NO: 857 - protein, 14 aa, synthetic construct
YCEGHSPEYMSKCL

SEQ ID NO: 858 - protein, 14 aa, synthetic construct
YCEGHTMEYMWKCL

SEQ ID NO: 859 - protein, 14 aa, synthetic construct
YCAGHLPEYMPHCI

SEQ ID NO: 860 - protein, 14 aa, synthetic construct
YCDGHSPQYIEKCL

SEQ ID NO: 861 - protein, 14 aa, synthetic construct
YCDGHSPEYILKCL

SEQ ID NO: 862 - protein, 14 aa, synthetic construct
YCDGHLDEYMAKCL

SEQ ID NO: 863 - protein, 14 aa, synthetic construct
YCDGHTLEYMWKCL

SEQ ID NO: 864 - protein, 14 aa, synthetic construct
YCEGHLPLYMWKCL

SEQ ID NO: 865 - protein, 14 aa, synthetic construct
YCDGHAPEYMAKCL

SEQ ID NO: 866 - protein, 14 aa, synthetic construct
YCAGHSPEHMWKCL

SEQ ID NO: 867 - protein, 14 aa, synthetic construct
YCEGHSEEYISKCL

SEQ ID NO: 868 - protein, 14 aa, synthetic construct
YCDGHLPIYMAKCL

SEQ ID NO: 869 - protein, 14 aa, synthetic construct
YCDGHAPQYMRKCL

SEQ ID NO: 870 - protein, 14 aa, synthetic construct
YCDGHAKEYMWKCL

SEQ ID NO: 871 - protein, 14 aa, synthetic construct
YCEGHSSEYMLKCL

SEQ ID NO: 872 - protein, 14 aa, synthetic construct
YCEGHAAEYMEKCL

SEQ ID NO: 873 - protein, 14 aa, synthetic construct
YCEGHSAQYMSKCL

SEQ ID NO: 874 - protein, 14 aa, synthetic construct
YCDGHSREYIAKCL

SEQ ID NO: 875 - protein, 14 aa, synthetic construct
YCDGHLPQYMWKCL

SEQ ID NO: 876 - protein, 14 aa, synthetic construct
YCDGHVPEYMAKCL

SEQ ID NO: 877 - protein, 14 aa, synthetic construct
YCDGHLPMYMMKCL

SEQ ID NO: 878 - protein, 14 aa, synthetic construct
YCQGHAPEYMAKCL

SEQ ID NO: 879 - protein, 14 aa, synthetic construct
YCDGHSQEYMMKCL

SEQ ID NO: 880 - protein, 14 aa, synthetic construct
YCSGHLPQYMQKCL

SEQ ID NO: 881 - protein, 14 aa, synthetic construct
YCDGHSSEYMAKCL

SEQ ID NO: 882 - protein, 14 aa, synthetic construct
YCDGHAPQYMQKCL

SEQ ID NO: 883 - protein, 14 aa, synthetic construct
YCEGHLPIYLEKCM

SEQ ID NO: 884 - protein, 14 aa, synthetic construct
YCEGHTPEYMQKCL

SEQ ID NO: 885 - protein, 14 aa, synthetic construct
YCDGHLPQYMMKCL

SEQ ID NO: 886 - protein, 14 aa, synthetic construct
YCDGHSTEYLWKCL

SEQ ID NO: 887 - protein, 14 aa, synthetic construct
YCEGHLGIYMYKCL

SEQ ID NO: 888 - protein, 14 aa, synthetic construct
YCDGHAAEYMAKCL

SEQ ID NO: 889 - protein, 14 aa, synthetic construct
YCEGHSQEYMSKCL

SEQ ID NO: 890 - protein, 14 aa, synthetic construct
YCDGHLPEYLWKCL

SEQ ID NO: 891 - protein, 14 aa, synthetic construct
YCEGHLPMYMEKCL

SEQ ID NO: 892 - protein, 14 aa, synthetic construct
YCDGHLSEYMEKCL

SEQ ID NO: 893 - protein, 14 aa, synthetic construct
YCEGHSPLYMWKCL

SEQ ID NO: 894 - protein, 14 aa, synthetic construct
YCEGHSPEYMEKCL

SEQ ID NO: 895 - protein, 14 aa, synthetic construct
YCAGHLPEYMEKCL

SEQ ID NO: 896 - protein, 14 aa, synthetic construct
YCEGHAWEYMAKCL

SEQ ID NO: 897 - protein, 14 aa, synthetic construct
YCQGHLPEYMNKCL

SEQ ID NO: 898 - protein, 14 aa, synthetic construct
YCDGHSQEYMAKCL

SEQ ID NO: 899 - protein, 14 aa, synthetic construct
YCQGHLPIYMEKCL

SEQ ID NO: 900 - protein, 14 aa, synthetic construct
YCDGHLPLYLAKCL

SEQ ID NO: 901 - protein, 14 aa, synthetic construct
YCDGHLPQYMNKCL

SEQ ID NO: 902 - protein, 14 aa, synthetic construct
YCEGHAPMYMWKCL

SEQ ID NO: 903 - protein, 14 aa, synthetic construct
YCEGHLPEYMQKCM

SEQ ID NO: 904 - protein, 14 aa, synthetic construct
YCDGHSAEYMAKCL

SEQ ID NO: 905 - protein, 14 aa, synthetic construct
YCEGHSPEYMYKCL

SEQ ID NO: 906 - protein, 14 aa, synthetic construct
YCDGHSMEYMSKCL

SEQ ID NO: 907 - protein, 14 aa, synthetic construct
YCEGHLPMYMDKCL

SEQ ID NO: 908 - protein, 14 aa, synthetic construct
YCDGHRGEYLQKCL

SEQ ID NO: 909 - protein, 14 aa, synthetic construct
YCEGHSPQYMWKCL

SEQ ID NO: 910 - protein, 14 aa, synthetic construct
YCEGHAAEYMTKCL

SEQ ID NO: 911 - protein, 14 aa, synthetic construct
YCEGHLPQYMKKCL

SEQ ID NO: 912 - protein, 14 aa, synthetic construct
YCDGHIEEYRAKCL

SEQ ID NO: 913 - protein, 14 aa, synthetic construct
YCEGHAPEYMLKCL

SEQ ID NO: 914 - protein, 14 aa, synthetic construct
YCDGHAPEYMEKCM

SEQ ID NO: 915 - protein, 14 aa, synthetic construct
YCEGHTVEYMAKCL

SEQ ID NO: 916 - protein, 14 aa, synthetic construct
YCDGHKAEYMDKCL

SEQ ID NO: 917 - protein, 14 aa, synthetic construct
YCDGHAPEYMLKCL

SEQ ID NO: 918 - protein, 14 aa, synthetic construct
YCDGHAPDYMLKCL

SEQ ID NO: 919 - protein, 14 aa, synthetic construct
YCDGHLPEYLPKCL

SEQ ID NO: 920 - protein, 14 aa, synthetic construct
YCDGHMPEYIAKCL

SEQ ID NO: 921 - protein, 14 aa, synthetic construct
YCDGHLPEYLSKCL

SEQ ID NO: 922 - protein, 14 aa, synthetic construct
YCAGHLPEYFLKCL

SEQ ID NO: 923 - protein, 14 aa, synthetic construct
YCDGHSPLYIWKCL

SEQ ID NO: 924 - protein, 14 aa, synthetic construct
YCDGHLPEYMHKCL

SEQ ID NO: 925 - protein, 14 aa, synthetic construct
YCDGHLPEYIEKCL

SEQ ID NO: 926 - protein, 14 aa, synthetic construct
YCDGHLPQYKAKCL

SEQ ID NO: 927 - protein, 14 aa, synthetic construct
YCDGHAVEYMAKCL

SEQ ID NO: 928 - protein, 14 aa, synthetic construct
YCDGHSIEYRWKCL

SEQ ID NO: 929 - protein, 14 aa, synthetic construct
YCEGHAEEYMQKCL

SEQ ID NO: 930 - protein, 14 aa, synthetic construct
YCDGHAPEYIYKCL

SEQ ID NO: 931 - protein, 14 aa, synthetic construct
YCDGHLEEYKQKCL

SEQ ID NO: 932 - protein, 14 aa, synthetic construct
YCMGHLPQYMQKCL

SEQ ID NO: 933 - protein, 14 aa, synthetic construct
YCDGHTQEYIAKCL

SEQ ID NO: 934 - protein, 14 aa, synthetic construct
YCDGHTQEYMAKCL

SEQ ID NO: 935 - protein, 14 aa, synthetic construct
YCEGHLPVYMWKCL

SEQ ID NO: 936 - protein, 14 aa, synthetic construct
YCDGHMPEYMWKCL

SEQ ID NO: 937 - protein, 14 aa, synthetic construct
YCAGHSPEYMTKCL

SEQ ID NO: 938 - protein, 14 aa, synthetic construct
YCAGHAPEYIQKCL

SEQ ID NO: 939 - protein, 14 aa, synthetic construct
YCDGHVAEYRDKCL

SEQ ID NO: 940 - protein, 14 aa, synthetic construct
YCAGHAPEYMQKCL

SEQ ID NO: 941 - protein, 14 aa, synthetic construct
YCDGHSNEYMAKCL

SEQ ID NO: 942 - protein, 14 aa, synthetic construct
YCEGHLPQYLQKCL

SEQ ID NO: 943 - protein, 14 aa, synthetic construct
YCDGHVAEYMAKCL

SEQ ID NO: 944 - protein, 14 aa, synthetic construct
YCDGHLPEYMWKCI

SEQ ID NO: 945 - protein, 14 aa, synthetic construct
YCDGHSAEYMWKCL

SEQ ID NO: 946 - protein, 14 aa, synthetic construct
YCDGHSLEYMAKCL

SEQ ID NO: 947 - protein, 14 aa, synthetic construct
YCEGHLPEYMSKCL

SEQ ID NO: 948 - protein, 14 aa, synthetic construct
YCAGHLPEYMQKCL

SEQ ID NO: 949 - protein, 14 aa, synthetic construct
YCDGHLGIYMWKCL

SEQ ID NO: 950 - protein, 14 aa, synthetic construct
YCEGHSAEYMAKCL

SEQ ID NO: 951 - protein, 14 aa, synthetic construct
YCDGHSDEYMAKCL

SEQ ID NO: 952 - protein, 14 aa, synthetic construct
YCEGHSLEYIGKCL

SEQ ID NO: 953 - protein, 14 aa, synthetic construct
YCDGHQPEYMAKCL

SEQ ID NO: 954 - protein, 14 aa, synthetic construct
YCAGHLPEYISKCL

SEQ ID NO: 955 - protein, 14 aa, synthetic construct
YCDGHIPIYMSKCL

SEQ ID NO: 956 - protein, 14 aa, synthetic construct
YCEGHLPQYLAKCL

SEQ ID NO: 957 - protein, 14 aa, synthetic construct
YCAGHLPLYMEKCL

SEQ ID NO: 958 - protein, 14 aa, synthetic construct
YCDGHSAEYMMKCL

SEQ ID NO: 959 - protein, 14 aa, synthetic construct
YCEGHLPQYIPKCL

SEQ ID NO: 960 - protein, 14 aa, synthetic construct
YCDGHAPQYMLKCL

SEQ ID NO: 961 - protein, 14 aa, synthetic construct
YCDGHLPVYMAKCL

SEQ ID NO: 962 - protein, 14 aa, synthetic construct
YCMGHSEEYMQKCL

SEQ ID NO: 963 - protein, 14 aa, synthetic construct
YCDGHLPEYMHKCL

SEQ ID NO: 964 - protein, 14 aa, synthetic construct
YCDGHLEEYMAKCL

SEQ ID NO: 965 - protein, 14 aa, synthetic construct
YCDGHMPEYMLKCL

SEQ ID NO: 966 - protein, 14 aa, synthetic construct
YCSGHAPIYMAKCL

SEQ ID NO: 967 - protein, 14 aa, synthetic construct
YCAGHTQEYMSKCL

SEQ ID NO: 968 - protein, 14 aa, synthetic construct
YCEGHSPQYMQKCL

SEQ ID NO: 969 - protein, 14 aa, synthetic construct
YCDGHVPQYMAKCL

SEQ ID NO: 970 - protein, 14 aa, synthetic construct
YCDGHSAEYMSKCL

SEQ ID NO: 971 - protein, 14 aa, synthetic construct
YCQGHLPQYIAKCL

SEQ ID NO: 972 - protein, 14 aa, synthetic construct
YCAGHLPQYMEKCM

SEQ ID NO: 973 - protein, 14 aa, synthetic construct
YCAGHLPEHIGKCL

SEQ ID NO: 974 - protein, 14 aa, synthetic construct
YCEGHTAEYLQKCL

SEQ ID NO: 975 - protein, 14 aa, synthetic construct
YCAGHSPEYMGKCM

SEQ ID NO: 976 - protein, 14 aa, synthetic construct
YCSGHLPEYMEKCL

SEQ ID NO: 977 - protein, 14 aa, synthetic construct
YCAGHLEIYMQKCL

SEQ ID NO: 978 - protein, 14 aa, synthetic construct
YCMGHLPQYMEKCL

SEQ ID NO: 979 - protein, 14 aa, synthetic construct
YCEGHSAEYMWKCL

SEQ ID NO: 980 - protein, 14 aa, synthetic construct
YCEGHAPEHMAKCL

SEQ ID NO: 981 - protein, 14 aa, synthetic construct
YCDGHAEQYMEKCL

SEQ ID NO: 982 - protein, 14 aa, synthetic construct
YCEGHSPEYMSHCF

SEQ ID NO: 983 - protein, 14 aa, synthetic construct
YCEGHSMQHMAKCL

SEQ ID NO: 984 - protein, 14 aa, synthetic construct
YCDGHAQEFMSKCL

SEQ ID NO: 985 - protein, 14 aa, synthetic construct
YCAGHLPEYIDKCL

SEQ ID NO: 986 - protein, 14 aa, synthetic construct
YCEGHAPQYIQKCL

SEQ ID NO: 987 - protein, 14 aa, synthetic construct
YCDGHELRYMAKCL

SEQ ID NO: 988 - protein, 14 aa, synthetic construct
YCDGHLPAYMAKCL

SEQ ID NO: 989 - protein, 14 aa, synthetic construct
YCEGHSDEYMLKCL

SEQ ID NO: 990 - protein, 14 aa, synthetic construct
YCEGHAPEYMMKCI

SEQ ID NO: 991 - protein, 14 aa, synthetic construct
YCEGHADIYMQKCL

SEQ ID NO: 992 - protein, 14 aa, synthetic construct
YCEGHSAEYMNKCL

SEQ ID NO: 993 - protein, 14 aa, synthetic construct
YCDGHAPQYMGKCL

SEQ ID NO: 994 - protein, 14 aa, synthetic construct
YCEGHLPIYMDKCL

SEQ ID NO: 995 - protein, 14 aa, synthetic construct
YCDGHAIEYMQKCL

SEQ ID NO: 996 - protein, 14 aa, synthetic construct
YCAGHIEEYMWKCL

SEQ ID NO: 997 - protein, 14 aa, synthetic construct
YCQGHMPEYMDKCL

SEQ ID NO: 998 - protein, 14 aa, synthetic construct
YCDGHAPEYVMKCL

SEQ ID NO: 999 - protein, 14 aa, synthetic construct
YCDGHVGEYMQKCL

SEQ ID NO: 1000 - protein, 14 aa, synthetic construct
YCDGHSAQYMHKCL

SEQ ID NO: 1001 - protein, 14 aa, synthetic construct
YCEGHAPEYMYKCL

SEQ ID NO: 1002 - protein, 14 aa, synthetic construct
YCDGHLPEYQMKCL

SEQ ID NO: 1003 - protein, 14 aa, synthetic construct
YCDGHASEYMMKCL

SEQ ID NO: 1004 - protein, 14 aa, synthetic construct
YCDGHLIEYMEKCL

SEQ ID NO: 1005 - protein, 14 aa, synthetic construct
YCEGHAIQYMSKCL

SEQ ID NO: 1006 - protein, 14 aa, synthetic construct
YCEGHAPQHMDKCL

SEQ ID NO: 1007 - protein, 14 aa, synthetic construct
YCEGHSPQYMSKCL

SEQ ID NO: 1008 - protein, 14 aa, synthetic construct
YCDGHFREYMQKCL

SEQ ID NO: 1009 - protein, 14 aa, synthetic construct
YCLGHAPQYIQKCL

SEQ ID NO: 1010 - protein, 14 aa, synthetic construct
YCDGHSSEYMWKCL

SEQ ID NO: 1011 - protein, 14 aa, synthetic construct
YCSGHLPEYMSKCL

SEQ ID NO: 1012 - protein, 14 aa, synthetic construct
YCEGHAPQYIAKCL

SEQ ID NO: 1013 - protein, 14 aa, synthetic construct
YCDGHSPMYIGKCL

SEQ ID NO: 1014 - protein, 14 aa, synthetic construct
YCAGHLPEYMMKCL

SEQ ID NO: 1015 - protein, 14 aa, synthetic construct
YCEGHRPEYMQKCL

SEQ ID NO: 1016 - protein, 14 aa, synthetic construct
YCEGHAREHMAKCL

SEQ ID NO: 1017 - protein, 14 aa, synthetic construct
YCEGHSPEYMTKCL

SEQ ID NO: 1018 - protein, 14 aa, synthetic construct
YCEGHSIQYMAKCL

SEQ ID NO: 1019 - protein, 14 aa, synthetic construct
YCEGHSLEYMGKCL

SEQ ID NO: 1020 - protein, 14 aa, synthetic construct
YCDGHAPEYMEKCL

SEQ ID NO: 1021 - protein, 14 aa, synthetic construct
YCDGHMGVYYWKCL

SEQ ID NO: 1022 - protein, 14 aa, synthetic construct
YCDGHEAQYMSKCL

SEQ ID NO: 1023 - protein, 14 aa, synthetic construct
YCDGHSHEYMEKCL

SEQ ID NO: 1024 - protein, 14 aa, synthetic construct
YCQGHLPEYMSKCL

SEQ ID NO: 1025 - protein, 14 aa, synthetic construct
YCEGHLSQYMQKCL

SEQ ID NO: 1026 - protein, 14 aa, synthetic construct
YCDGHSPIYMSKCL

SEQ ID NO: 1027 - protein, 14 aa, synthetic construct
YCDGHSDQYMWKCL

SEQ ID NO: 1028 - protein, 14 aa, synthetic construct
YCDGHLPQYMSKCL

SEQ ID NO: 1029 - protein, 14 aa, synthetic construct
YCEGHAAEYMMKCL

SEQ ID NO: 1030 - protein, 14 aa, synthetic construct
YCAGHLPMYMHKCL

SEQ ID NO: 1031 - protein, 14 aa, synthetic construct
YCDGHSQEYIAKCL

SEQ ID NO: 1032 - protein, 14 aa, synthetic construct
YCDGHMPQYMSKCL

SEQ ID NO: 1033 - protein, 14 aa, synthetic construct
YCVGHLPQYMEKCL

SEQ ID NO: 1034 - protein, 14 aa, synthetic construct
YCDGHLGIYMTKCL

SEQ ID NO: 1035 - protein, 14 aa, synthetic construct
YCDGHLWEYMDKCL

SEQ ID NO: 1036 - protein, 14 aa, synthetic construct
YCEGHLPMYFLKCM

SEQ ID NO: 1037 - protein, 14 aa, synthetic construct
YCDGHLPIYMTQCL

SEQ ID NO: 1038 - protein, 14 aa, synthetic construct
YCEGHLAEYMDKCL

SEQ ID NO: 1039 - protein, 14 aa, synthetic construct
YCDGHLEQYRAKCL

SEQ ID NO: 1040 - protein, 14 aa, synthetic construct
YCDGHLPEYLGKCL

SEQ ID NO: 1041 - protein, 14 aa, synthetic construct
YCAGHSVEYMAKCL

SEQ ID NO: 1042 - protein, 14 aa, synthetic construct
YCDGHSALYMWKCL

SEQ ID NO: 1043 - protein, 14 aa, synthetic construct
YCDGHSSEYMIKCL

SEQ ID NO: 1044 - protein, 14 aa, synthetic construct
YCDGHLIEYMYKCL

SEQ ID NO: 1045 - protein, 14 aa, synthetic construct
YCDGHSAEYMQKCL

SEQ ID NO: 1046 - protein, 14 aa, synthetic construct
YCDGHLVEYMSKCL

SEQ ID NO: 1047 - protein, 14 aa, synthetic construct
YCEGHLSQYMEKCL

SEQ ID NO: 1048 - protein, 14 aa, synthetic construct
YCDGHSPEHIRKCL

SEQ ID NO: 1049 - protein, 14 aa, synthetic construct
YCAGHLEIYMNKCL

SEQ ID NO: 1050 - protein, 14 aa, synthetic construct
YCEGHLSEYMAKCL

SEQ ID NO: 1051 - protein, 14 aa, synthetic construct
YCEGHLPIYLSKCL

SEQ ID NO: 1052 - protein, 14 aa, synthetic construct
YCDGHASEYMWKCL

SEQ ID NO: 1053 - protein, 14 aa, synthetic construct
YCSGHAPEYMAKCL

SEQ ID NO: 1054 - protein, 14 aa, synthetic construct
YCEGHRAEYMEKCL

SEQ ID NO: 1055 - protein, 14 aa, synthetic construct
YCDGHSPDYIWKCL

SEQ ID NO: 1056 - protein, 14 aa, synthetic construct
YCMGHAPEYMEKCL

SEQ ID NO: 1057 - protein, 14 aa, synthetic construct
YCMGHQPEYMQKCL

SEQ ID NO: 1058 - protein, 14 aa, synthetic construct
YCDGHMPEYMEKCL

SEQ ID NO: 1059 - protein, 14 aa, synthetic construct
YCDGHSAEYLAKCL

SEQ ID NO: 1060 - protein, 14 aa, synthetic construct
YCDGHSPEYMTKCL

SEQ ID NO: 1061 - protein, 14 aa, synthetic construct
YCEGHSMEYMAKCL

SEQ ID NO: 1062 - protein, 14 aa, synthetic construct
YCAGHMPEYIDKCL

SEQ ID NO: 1063 - protein, 14 aa, synthetic construct
YCAGHSPEFMEKCL

SEQ ID NO: 1064 - protein, 14 aa, synthetic construct
YCDGHLNEYMEKCL

SEQ ID NO: 1065 - protein, 14 aa, synthetic construct
YCDGHLKEYQEKCL

SEQ ID NO: 1066 - protein, 14 aa, synthetic construct
YCEGHLAQYMWKCL

SEQ ID NO: 1067 - protein, 14 aa, synthetic construct
YCEGHLAVYMQKCL

SEQ ID NO: 1068 - protein, 14 aa, synthetic construct
YCEGHSSEYMEKCL

SEQ ID NO: 1069 - protein, 14 aa, synthetic construct
YCDGHLDIYLAKCL

SEQ ID NO: 1070 - protein, 14 aa, synthetic construct
YCEGHSEEYMSKCL

SEQ ID NO: 1071 - protein, 14 aa, synthetic construct
YCDGHSQEYMWKCL

SEQ ID NO: 1072 - protein, 14 aa, synthetic construct
YCDGHAPEYMKKCL

SEQ ID NO: 1073 - protein, 14 aa, synthetic construct
YCDGHSKEYMHKCL

SEQ ID NO: 1074 - protein, 14 aa, synthetic construct
YCDGHEPQYLEKCL

SEQ ID NO: 1075 - protein, 14 aa, synthetic construct
YCDGHAEEYMSKCL

SEQ ID NO: 1076 - protein, 14 aa, synthetic construct
YCDGHVEEYLYKCL

SEQ ID NO: 1077 - protein, 14 aa, synthetic construct
YCAGHLEEYMDKCL

SEQ ID NO: 1078 - protein, 14 aa, synthetic construct
YCAGHAPQYMEKCL

SEQ ID NO: 1079 - protein, 14 aa, synthetic construct
YCAGHLPQYIAKCL

SEQ ID NO: 1080 - protein, 14 aa, synthetic construct
YCDGHLKEYMAKCL

SEQ ID NO: 1081 - protein, 14 aa, synthetic construct
YCDGHRPEYMEKCL

SEQ ID NO: 1082 - protein, 14 aa, synthetic construct
YCDGHLPEYMGKCL

SEQ ID NO: 1083 - protein, 14 aa, synthetic construct
YCEGHLQEYMEKCL

SEQ ID NO: 1084 - protein, 14 aa, synthetic construct
YCEGHIPEYMAKCL

SEQ ID NO: 1085 - protein, 14 aa, synthetic construct
YCDGHSPEYMPKCL

SEQ ID NO: 1086 - protein, 14 aa, synthetic construct
YCDGHLAEYMPKCL

SEQ ID NO: 1087 - protein, 14 aa, synthetic construct
YCEGHSPEYMWKCL

SEQ ID NO: 1088 - protein, 14 aa, synthetic construct
YCDGHIDEYLQKCL

SEQ ID NO: 1089 - protein, 14 aa, synthetic construct
YCEGHVAEYMLKCL

SEQ ID NO: 1090 - protein, 14 aa, synthetic construct
YCEGHLSEYMSKCL

SEQ ID NO: 1091 - protein, 14 aa, synthetic construct
YCEGHMSEYMAKCL

SEQ ID NO: 1092 - protein, 14 aa, synthetic construct
YCDGHSWEYIQKCL

SEQ ID NO: 1093 - protein, 14 aa, synthetic construct
YCEGHSLEYMAKCL

SEQ ID NO: 1094 - protein, 14 aa, synthetic construct
YCEGHSYEYMWKCL

SEQ ID NO: 1095 - protein, 14 aa, synthetic construct
YCEGHLPEYMMKCL

SEQ ID NO: 1096 - protein, 14 aa, synthetic construct
YCDGHLPEYMRKCL

SEQ ID NO: 1097 - protein, 14 aa, synthetic construct
YCEGHSPLYMSKCL

SEQ ID NO: 1098 - protein, 14 aa, synthetic construct
YCEGHSWEYIGKCL

SEQ ID NO: 1099 - protein, 14 aa, synthetic construct
YCDGHSALYMSKCL

SEQ ID NO: 1100 - protein, 14 aa, synthetic construct
YCDGHTGVYFYKCL

SEQ ID NO: 1101 - protein, 14 aa, synthetic construct
YCEGHTSEYMNKCL

SEQ ID NO: 1102 - protein, 14 aa, synthetic construct
YCEGHRSEYMAKCL

SEQ ID NO: 1103 - protein, 14 aa, synthetic construct
YCDGHLAMYMDKCL

SEQ ID NO: 1104 - protein, 14 aa, synthetic construct
YCDGHMPEYLAKCL

SEQ ID NO: 1105 - protein, 14 aa, synthetic construct
YCEGHAAEYMSKCL

SEQ ID NO: 1106 - protein, 14 aa, synthetic construct
YCAGHSSEYMWKCL

SEQ ID NO: 1107 - protein, 14 aa, synthetic construct
YCDGHSWAYMWKCL

SEQ ID NO: 1108 - protein, 14 aa, synthetic construct
YCDGHSAAYIMKCL

SEQ ID NO: 1109 - protein, 14 aa, synthetic construct
YCDGHSLQYLGKCL

SEQ ID NO: 1110 - protein, 14 aa, synthetic construct
YCEGHSQEYMQKCL

SEQ ID NO: 1111 - protein, 14 aa, synthetic construct
YCAGHLPEYLSKCL

SEQ ID NO: 1112 - protein, 14 aa, synthetic construct
YCEGHLQIYMSKCL

SEQ ID NO: 1113 - protein, 14 aa, synthetic construct
YCAGHAPEYMFKCM

SEQ ID NO: 1114 - protein, 14 aa, synthetic construct
YCEGHRPEYMAKCL

SEQ ID NO: 1115 - protein, 14 aa, synthetic construct
YCEGHLPEYMRKCL

SEQ ID NO: 1116 - protein, 14 aa, synthetic construct
YCDGHSPAYMAKCL

SEQ ID NO: 1117 - protein, 14 aa, synthetic construct
YCDGHLPMYFAKCM

SEQ ID NO: 1118 - protein, 14 aa, synthetic construct
YCDGHSSEYIVKCL

SEQ ID NO: 1119 - protein, 14 aa, synthetic construct
YCEGHAAEYMWKCL

SEQ ID NO: 1120 - protein, 14 aa, synthetic construct
YCEGHSAEYIFKCL

SEQ ID NO: 1121 - protein, 14 aa, synthetic construct
YCEGHSPMYMQKCM

SEQ ID NO: 1122 - protein, 14 aa, synthetic construct
YCDGHSAEYMEKCI

SEQ ID NO: 1123 - protein, 14 aa, synthetic construct
YCDGHLPLYMHKCL

SEQ ID NO: 1124 - protein, 14 aa, synthetic construct
YCEGHAPQYLNKCL

SEQ ID NO: 1125 - protein, 14 aa, synthetic construct
YCDGHAREYMTKCL

SEQ ID NO: 1126 - protein, 14 aa, synthetic construct
YCDGHTEEYMDKCL

SEQ ID NO: 1127 - protein, 14 aa, synthetic construct
YCDGHSSMYMAKCL

SEQ ID NO: 1128 - protein, 14 aa, synthetic construct
YCAGHSSEYIWKCL

SEQ ID NO: 1129 - protein, 14 aa, synthetic construct
YCEGHSAEFMTKCL

SEQ ID NO: 1130 - protein, 14 aa, synthetic construct
YCQGHSAEYMMKCL

SEQ ID NO: 1131 - protein, 14 aa, synthetic construct
YCAGHLPQYMNKCL

SEQ ID NO: 1132 - protein, 14 aa, synthetic construct
YCDGHKAEYMEKCL

SEQ ID NO: 1133 - protein, 14 aa, synthetic construct
YCAGHLPMYMAKCL

SEQ ID NO: 1134 - protein, 14 aa, synthetic construct
YCDGHTREYIDKCL

SEQ ID NO: 1135 - protein, 14 aa, synthetic construct
YCVGHAPEFMAKCL

SEQ ID NO: 1136 - protein, 14 aa, synthetic construct
YCAGHAEQYMAKCL

SEQ ID NO: 1137 - protein, 14 aa, synthetic construct
YCDGHLSEYMFKCL

SEQ ID NO: 1138 - protein, 14 aa, synthetic construct
YCDGHLGVYMAKCL

SEQ ID NO: 1139 - protein, 14 aa, synthetic construct
YCDGHTSEYITKCL

SEQ ID NO: 1140 - protein, 14 aa, synthetic construct
YCDGHSPEYIAKCL

SEQ ID NO: 1141 - protein, 14 aa, synthetic construct
YCDGHLAEYMVKCL

SEQ ID NO: 1142 - protein, 14 aa, synthetic construct
YCDGHAPMYMAKCL

SEQ ID NO: 1143 - protein, 14 aa, synthetic construct
YCEGHLPAYMQKCL

SEQ ID NO: 1144 - protein, 14 aa, synthetic construct
YCEGHHPQYMAKCL

SEQ ID NO: 1145 - protein, 14 aa, synthetic construct
YCAGHVPEYMAKCL

SEQ ID NO: 1146 - protein, 14 aa, synthetic construct
YCDGHSAEYITKCL

SEQ ID NO: 1147 - protein, 14 aa, synthetic construct
YCEGHLDEYMWKCL

SEQ ID NO: 1148 - protein, 14 aa, synthetic construct
YCDGLASEYMSKCL

SEQ ID NO: 1149 - protein, 14 aa, synthetic construct
YCDGHSSEYIAKCL

SEQ ID NO: 1150 - protein, 14 aa, synthetic construct
YCEGHSPQYVQKCL

SEQ ID NO: 1151 - protein, 14 aa, synthetic construct
YCEGHSPEYMRKCL

SEQ ID NO: 1152 - protein, 14 aa, synthetic construct
YCDGHLDEYMEKCL

SEQ ID NO: 1153 - protein, 14 aa, synthetic construct
YCAGHLPEYMLKCL

SEQ ID NO: 1154 - protein, 14 aa, synthetic construct
YCEGHLPIYMSKCL

SEQ ID NO: 1155 - protein, 14 aa, synthetic construct
YCVGHLQEYMEKCL

SEQ ID NO: 1156 - protein, 14 aa, synthetic construct
YCDGHSPQYMQKCL

SEQ ID NO: 1157 - protein, 14 aa, synthetic construct
YCDGHIPEYLAKCL

SEQ ID NO: 1158 - protein, 14 aa, synthetic construct
YCDGHSQEYMLKCL

SEQ ID NO: 1159 - protein, 14 aa, synthetic construct
YCDGHVEPYLSKCL

SEQ ID NO: 1160 - protein, 14 aa, synthetic construct
YCDGHKPQYMEKCL

SEQ ID NO: 1161 - protein, 14 aa, synthetic construct
YCDGHIGEYMVKCL

SEQ ID NO: 1162 - protein, 14 aa, synthetic construct
YCEGHLAQYMNKCL

SEQ ID NO: 1163 - protein, 14 aa, synthetic construct
YCDGHVQEYMQKCL

SEQ ID NO: 1164 - protein, 14 aa, synthetic construct
YCHGHLQEYMAKCL

SEQ ID NO: 1165 - protein, 14 aa, synthetic construct
YCDGHSPEYMNKCL

SEQ ID NO: 1166 - protein, 14 aa, synthetic construct
YCDGHAPVYMAKCL

SEQ ID NO: 1167 - protein, 14 aa, synthetic construct
YCEGHSAEYMLKCL

SEQ ID NO: 1168 - protein, 14 aa, synthetic construct
YCDGHHIEYLAKCL

SEQ ID NO: 1169 - protein, 14 aa, synthetic construct
YCSGHLPEYMQKCL

SEQ ID NO: 1170 - protein, 14 aa, synthetic construct
YCEGHLPEYMQKCL

SEQ ID NO: 1171 - protein, 14 aa, synthetic construct
YCDGHSLQYMDKCL

SEQ ID NO: 1172 - protein, 14 aa, synthetic construct
YCDGHYPEYMSKCL

SEQ ID NO: 1173 - protein, 14 aa, synthetic construct
YCDGHASEYMAKCL

SEQ ID NO: 1174 - protein, 14 aa, synthetic construct
YCDGHAEKYMQKCL

SEQ ID NO: 1175 - protein, 14 aa, synthetic construct
YCEGHAIEYLAKCL

SEQ ID NO: 1176 - protein, 14 aa, synthetic construct
YCEGHSAEYMEKCL

SEQ ID NO: 1177 - protein, 14 aa, synthetic construct
YCSGHSAEYMLKCL

SEQ ID NO: 1178 - protein, 14 aa, synthetic construct
YCEGHLPDYMQKCL

SEQ ID NO: 1179 - protein, 14 aa, synthetic construct
YCDGHLEEYMVKCM

SEQ ID NO: 1180 - protein, 14 aa, synthetic construct
YCEGHLQTYMAKCL

SEQ ID NO: 1181 - protein, 14 aa, synthetic construct
YCAGHSQEHIQKCL

SEQ ID NO: 1182 - protein, 14 aa, synthetic construct
YCDGHLPEYIFKCL

SEQ ID NO: 1183 - protein, 14 aa, synthetic construct
YCSGHLPEYMGKCL

SEQ ID NO: 1184 - protein, 14 aa, synthetic construct
YCDGHAEEYLWKCL

SEQ ID NO: 1185 - protein, 14 aa, synthetic construct
YCAGHSAEYMAKCL

SEQ ID NO: 1186 - protein, 14 aa, synthetic construct
YCDGHSGVYMWKCL

SEQ ID NO: 1187 - protein, 14 aa, synthetic construct
YCDGHTQAYIQKCL

SEQ ID NO: 1188 - protein, 14 aa, synthetic construct
YCDGHAIQYIGKCL

SEQ ID NO: 1189 - protein, 14 aa, synthetic construct
YCDGHAAEFMMKCL

SEQ ID NO: 1190 - protein, 14 aa, synthetic construct
YCDGHLSEYMAKCL

SEQ ID NO: 1191 - protein, 14 aa, synthetic construct
YCEGHSEMYMKKCL

SEQ ID NO: 1192 - protein, 14 aa, synthetic construct
YCDGHLQIYLWKCL

SEQ ID NO: 1193 - protein, 14 aa, synthetic construct
YCQGHLPVYMEKCL

SEQ ID NO: 1194 - protein, 14 aa, synthetic construct
YCDGHAAEYMDKCL

SEQ ID NO: 1195 - protein, 14 aa, synthetic construct
YCEGHSVQYMQKCL

SEQ ID NO: 1196 - protein, 14 aa, synthetic construct
YCAGHLPEYLDKCL

SEQ ID NO: 1197 - protein, 14 aa, synthetic construct
YCDGHSREYMVKCL

SEQ ID NO: 1198 - protein, 14 aa, synthetic construct
YCDGHLVEYRGKCL

SEQ ID NO: 1199 - protein, 14 aa, synthetic construct
YCAGHSAEYMWKCL

SEQ ID NO: 1200 - protein, 14 aa, synthetic construct
YCDGHLQIYMHKCL

SEQ ID NO: 1201 - protein, 14 aa, synthetic construct
YCAGHSMEYMAKCL

SEQ ID NO: 1202 - protein, 14 aa, synthetic construct
YCDGHLPEYFLKCL

SEQ ID NO: 1203 - protein, 14 aa, synthetic construct
YCDGHSLAYIAKCL

SEQ ID NO: 1204 - protein, 14 aa, synthetic construct
YCAGHTQEYMYKCL

SEQ ID NO: 1205 - protein, 14 aa, synthetic construct
YCEGHAQEYMSKCL

SEQ ID NO: 1206 - protein, 14 aa, synthetic construct
YCEGHLPQYFMKCL

SEQ ID NO: 1207 - protein, 14 aa, synthetic construct
YCDGHSWEYMEKCL

SEQ ID NO: 1208 - protein, 14 aa, synthetic construct
YCAGHSPLYMLKCL

SEQ ID NO: 1209 - protein, 14 aa, synthetic construct
YCEGHSAEYMQKCL

SEQ ID NO: 1210 - protein, 14 aa, synthetic construct
YCDGHLPVYLEKCL

SEQ ID NO: 1211 - protein, 14 aa, synthetic construct
YCAGHLQEYMQKCL

SEQ ID NO: 1212 - protein, 14 aa, synthetic construct
YCDGHAIEYMAKCL

SEQ ID NO: 1213 - protein, 14 aa, synthetic construct
YCEGHKPEYMQKCL

SEQ ID NO: 1214 - protein, 14 aa, synthetic construct
YCDGHAWEYMTKCL

SEQ ID NO: 1215 - protein, 14 aa, synthetic construct
YCEGHSPWYMNKCL

SEQ ID NO: 1216 - protein, 14 aa, synthetic construct
YCDGHSPAYIWKCL

SEQ ID NO: 1217 - protein, 14 aa, synthetic construct
YCDGHSEQYMSKCL

SEQ ID NO: 1218 - protein, 14 aa, synthetic construct
YCDGHAKEYMDKCL

SEQ ID NO: 1219 - protein, 14 aa, synthetic construct
YCDGHSTEYMEKCL

SEQ ID NO: 1220 - protein, 14 aa, synthetic construct
YCDGHSSLYMHKCL

SEQ ID NO: 1221 - protein, 14 aa, synthetic construct
YCDGHSWQYISKCL

SEQ ID NO: 1222 - protein, 14 aa, synthetic construct
YCEGHAPQYMNKCL

SEQ ID NO: 1223 - protein, 14 aa, synthetic construct
YCDGHAPQWMAKCL

SEQ ID NO: 1224 - protein, 14 aa, synthetic construct
YCDGHSREYMSKCL

SEQ ID NO: 1225 - protein, 14 aa, synthetic construct
YCDGHAAEYMAKCV

SEQ ID NO: 1226 - protein, 14 aa, synthetic construct
YCEGHAQEYMNKCL

SEQ ID NO: 1227 - protein, 14 aa, synthetic construct
YCEGHAPQYMTKCL

SEQ ID NO: 1228 - protein, 14 aa, synthetic construct
YCDGHSADYMAKCL

SEQ ID NO: 1229 - protein, 14 aa, synthetic construct
YCDGHIGLYLNKCL

SEQ ID NO: 1230 - protein, 14 aa, synthetic construct
YCEGHLPMYMIKCL

SEQ ID NO: 1231 - protein, 14 aa, synthetic construct
YCEGHLPQYMRPCL

SEQ ID NO: 1232 - protein, 14 aa, synthetic construct
YCEGHLSQYMSKCL

SEQ ID NO: 1233 - protein, 14 aa, synthetic construct
YCDGHSPEYIGKCL

SEQ ID NO: 1234 - protein, 14 aa, synthetic construct
YCAGHLPEFMDKCL

SEQ ID NO: 1235 - protein, 14 aa, synthetic construct
YCDGHSREYMNKCL

SEQ ID NO: 1236 - protein, 14 aa, synthetic construct
YCDGHDVEYMAKCL

SEQ ID NO: 1237 - protein, 14 aa, synthetic construct
YCDGHSEVYMAKCL

SEQ ID NO: 1238 - protein, 14 aa, synthetic construct
YCDGHSLLYLSKCL

SEQ ID NO: 1239 - protein, 14 aa, synthetic construct
YCEGHLAVYMEKCL

SEQ ID NO: 1240 - protein, 14 aa, synthetic construct
YCEGHSLMYMWKCL

SEQ ID NO: 1241 - protein, 14 aa, synthetic construct
YCAGHAAEYMTKCL

SEQ ID NO: 1242 - protein, 14 aa, synthetic construct
YCDGHSVEYMEKCL

SEQ ID NO: 1243 - protein, 14 aa, synthetic construct
YCDGHAQEYRLKCL

SEQ ID NO: 1244 - protein, 14 aa, synthetic construct
YCDGHSAEYLLKCL

SEQ ID NO: 1245 - protein, 14 aa, synthetic construct
YCDGHGPQYIQKCL

SEQ ID NO: 1246 - protein, 14 aa, synthetic construct
YCEGHIAEYMQKCL

SEQ ID NO: 1247 - protein, 14 aa, synthetic construct
YCEGHSAQYMHKCL

SEQ ID NO: 1248 - protein, 14 aa, synthetic construct
YCEGHTAEHMQKCL

SEQ ID NO: 1249 - protein, 14 aa, synthetic construct
YCAGHVAEYMAKCL

SEQ ID NO: 1250 - protein, 14 aa, synthetic construct
YCDGHATEYMQKCL

SEQ ID NO: 1251 - protein, 14 aa, synthetic construct
YCEGHMWEYMAKCL

SEQ ID NO: 1252 - protein, 14 aa, synthetic construct
YCDGHDVEYMSKCL

SEQ ID NO: 1253 - protein, 14 aa, synthetic construct
YCAGHSLEYMQKCL

SEQ ID NO: 1254 - protein, 14 aa, synthetic construct
YCEGHDLIYMWKCL

SEQ ID NO: 1255 - protein, 14 aa, synthetic construct
YCAGHAPEYMSKCL

SEQ ID NO: 1256 - protein, 14 aa, synthetic construct
YCEGHSSEYMWKCL

SEQ ID NO: 1257 - protein, 14 aa, synthetic construct
YCDGHLDVYRAKCL

SEQ ID NO: 1258 - protein, 14 aa, synthetic construct
YCEGHLEQYMQKCL

SEQ ID NO: 1259 - protein, 14 aa, synthetic construct
YCEGHSWVYMAKCL

SEQ ID NO: 1260 - protein, 14 aa, synthetic construct
YCDGHSLEYIGKCL

SEQ ID NO: 1261 - protein, 14 aa, synthetic construct
YCDGHSEAFMQKCL

SEQ ID NO: 1262 - protein, 14 aa, synthetic construct
YCAGHLPEYMGKCL

SEQ ID NO: 1263 - protein, 14 aa, synthetic construct
YCAGHLAIYMSKCL

SEQ ID NO: 1264 - protein, 14 aa, synthetic construct
YCDGHLSEYMSKCL

SEQ ID NO: 1265 - protein, 14 aa, synthetic construct
YCEGHVTEYMQKCL

SEQ ID NO: 1266 - protein, 14 aa, synthetic construct
YCDGHAQEYMDKCL

SEQ ID NO: 1267 - protein, 14 aa, synthetic construct
YCEGHAPQYIMKCL

SEQ ID NO: 1268 - protein, 14 aa, synthetic construct
YCDGHELKYMLKCL

SEQ ID NO: 1269 - protein, 14 aa, synthetic construct
YCDGHLLEYKAKCL

SEQ ID NO: 1270 - protein, 14 aa, synthetic construct
YCEGHLEEYMAKCL

SEQ ID NO: 1271 - protein, 14 aa, synthetic construct
YCDGHSPEYMLKCL

SEQ ID NO: 1272 - protein, 14 aa, synthetic construct
YCAGHSPQYMEKCL

SEQ ID NO: 1273 - protein, 14 aa, synthetic construct
YCDGHSVKYMAKCL

SEQ ID NO: 1274 - protein, 14 aa, synthetic construct
YCSGHLPEYMWKCL

SEQ ID NO: 1275 - protein, 14 aa, synthetic construct
YCDGHSVEYKLKCM

SEQ ID NO: 1276 - protein, 14 aa, synthetic construct
YCDGHAQEYMVKCL

SEQ ID NO: 1277 - protein, 14 aa, synthetic construct
YCAGHSPEYMQKCL

SEQ ID NO: 1278 - protein, 14 aa, synthetic construct
YCEGHLPLYMDKCL

SEQ ID NO: 1279 - protein, 14 aa, synthetic construct
YCEGHSAAYMQKCL

SEQ ID NO: 1280 - protein, 14 aa, synthetic construct
YCEGHMPEYLQKCL

SEQ ID NO: 1281 - protein, 14 aa, synthetic construct
YCDGHELQYMAKCL

SEQ ID NO: 1282 - protein, 14 aa, synthetic construct
YCDGHRLEYLEKCL

SEQ ID NO: 1283 - protein, 14 aa, synthetic construct
YCAGHLDQYIEKCL

SEQ ID NO: 1284 - protein, 14 aa, synthetic construct
YCDGHAQEFIWKCL

SEQ ID NO: 1285 - protein, 14 aa, synthetic construct
YCDGHSEAYMWKCL

SEQ ID NO: 1286 - protein, 14 aa, synthetic construct
YCEGHADEYMWKCL

SEQ ID NO: 1287 - protein, 14 aa, synthetic construct
YCEGHSVEYIGKCL

SEQ ID NO: 1288 - protein, 14 aa, synthetic construct
YCDGHRVEYMAKCL

SEQ ID NO: 1289 - protein, 14 aa, synthetic construct
YCEGHSWEHMEKCL

SEQ ID NO: 1290 - protein, 14 aa, synthetic construct
YCAGHSSEYIPKCL

SEQ ID NO: 1291 - protein, 14 aa, synthetic construct
YCDGHLPQYLQKCT

SEQ ID NO: 1292 - protein, 14 aa, synthetic construct
YCDGHAKEYIQKCL

SEQ ID NO: 1293 - protein, 14 aa, synthetic construct
YCEGHLPQYMVKCL

SEQ ID NO: 1294 - protein, 14 aa, synthetic construct
YCQGHADEYMAKCL

SEQ ID NO: 1295 - protein, 14 aa, synthetic construct
YCDGHAEEYLLKCL

SEQ ID NO: 1296 - protein, 14 aa, synthetic construct
YCEGHLGIYMTKCL

SEQ ID NO: 1297 - protein, 14 aa, synthetic construct
YCDGHSWQYMWKCI

SEQ ID NO: 1298 - protein, 14 aa, synthetic construct
YCEGHSEEFMSKCL

SEQ ID NO: 1299 - protein, 14 aa, synthetic construct
YCDGHLPMYMKKCL

SEQ ID NO: 1300 - protein, 14 aa, synthetic construct
YCQGHLPQYVEKCL

SEQ ID NO: 1301 - protein, 14 aa, synthetic construct
YCEGHLDMYVWKCL

SEQ ID NO: 1302 - protein, 14 aa, synthetic construct
YCDGHSQEYMAHCL

SEQ ID NO: 1303 - protein, 14 aa, synthetic construct
YCDGHSPLYMVKCL

SEQ ID NO: 1304 - protein, 14 aa, synthetic construct
YCDGHFLTYMTKCL

SEQ ID NO: 1305 - protein, 14 aa, synthetic construct
YCAGHSEEYMDKCL

SEQ ID NO: 1306 - protein, 14 aa, synthetic construct
YCDGHSEVYMSKCL

SEQ ID NO: 1307 - protein, 14 aa, synthetic construct
YCEGHTLEYMWKCL

SEQ ID NO: 1308 - protein, 14 aa, synthetic construct
YCDGHSQAHMQKCL

SEQ ID NO: 1309 - protein, 14 aa, synthetic construct
YCAGHDQQYMEKCL

SEQ ID NO: 1310 - protein, 14 aa, synthetic construct
YCDGHLPVYMMKCL

SEQ ID NO: 1311 - protein, 14 aa, synthetic construct
YCAGHNAQYMSKCL

SEQ ID NO: 1312 - protein, 14 aa, synthetic construct
YCDGHTSEYMTKCL

SEQ ID NO: 1313 - protein, 14 aa, synthetic construct
YCEGHAPVYMFKCL

SEQ ID NO: 1314 - protein, 14 aa, synthetic construct
YCEGHLGQYMEKCL

SEQ ID NO: 1315 - protein, 14 aa, synthetic construct
YCDGHNGVYWWKCI

SEQ ID NO: 1316 - protein, 14 aa, synthetic construct
YCDGHAPEYLTKCL

SEQ ID NO: 1317 - protein, 14 aa, synthetic construct
YCEGHSIQYMTKCL

SEQ ID NO: 1318 - protein, 14 aa, synthetic construct
YCDGHLQIYMGKCL

SEQ ID NO: 1319 - protein, 14 aa, synthetic construct
YCDGHSVEYLDKCL

SEQ ID NO: 1320 - protein, 14 aa, synthetic construct
YCDGHAWQYMWKCL

SEQ ID NO: 1321 - protein, 14 aa, synthetic construct
YCDGHLPEYLAKCL

SEQ ID NO: 1322 - protein, 14 aa, synthetic construct
YCDGHLAVYMAKCL

SEQ ID NO: 1323 - protein, 14 aa, synthetic construct
YCAGHLPVYMDKCL

SEQ ID NO: 1324 - protein, 14 aa, synthetic construct
YCEGHSAMYIWKCL

SEQ ID NO: 1325 - protein, 14 aa, synthetic construct
YCAGHLEEYMWKCL

SEQ ID NO: 1326 - protein, 14 aa, synthetic construct
YCDGHSELYMAKCL

SEQ ID NO: 1327 - protein, 14 aa, synthetic construct
YCDGHSAEYLSKCL

SEQ ID NO: 1328 - protein, 14 aa, synthetic construct
YCEGHMPQYMEKCL

SEQ ID NO: 1329 - protein, 14 aa, synthetic construct
YCEGHSLMYMAKCL

SEQ ID NO: 1330 - protein, 14 aa, synthetic construct
YCDGHSQEYMEKCL

SEQ ID NO: 1331 - protein, 14 aa, synthetic construct
YCDGHKAEYMQKCL

SEQ ID NO: 1332 - protein, 14 aa, synthetic construct
YCDGHSPQYIQKCL

SEQ ID NO: 1333 - protein, 14 aa, synthetic construct
YCSGHLPQYLEKCL

SEQ ID NO: 1334 - protein, 14 aa, synthetic construct
YCDGHHKEYLLKCL

SEQ ID NO: 1335 - protein, 14 aa, synthetic construct
YCDGHLALHMKKCL

SEQ ID NO: 1336 - protein, 14 aa, synthetic construct
YCEGHIMQYMAQCL

SEQ ID NO: 1337 - protein, 14 aa, synthetic construct
YCDGHLPIYQAKCL

SEQ ID NO: 1338 - protein, 14 aa, synthetic construct
YCDGHSEQYIAKCL

SEQ ID NO: 1339 - protein, 14 aa, synthetic construct
YCDGHLPEYITKCL

SEQ ID NO: 1340 - protein, 14 aa, synthetic construct
YCEGHRPEYMQKCV

SEQ ID NO: 1341 - protein, 14 aa, synthetic construct
YCAGHTVENMAKCL

SEQ ID NO: 1342 - protein, 14 aa, synthetic construct
YCEGHVLEYRGKCD

SEQ ID NO: 1343 - protein, 14 aa, synthetic construct
YCDGHVAEYRHKCL

SEQ ID NO: 1344 - protein, 14 aa, synthetic construct
YCEGHLDQYMTKCL

SEQ ID NO: 1345 - protein, 14 aa, synthetic construct
YCAGHTQEYIEKCL

SEQ ID NO: 1346 - protein, 14 aa, synthetic construct
YCDGHLAIYIGKCL

SEQ ID NO: 1347 - protein, 14 aa, synthetic construct
YCDGHLEIYMSKCL

SEQ ID NO: 1348 - protein, 14 aa, synthetic construct
YCDGHLLEYMSKCL

SEQ ID NO: 1349 - protein, 14 aa, synthetic construct
YCDGHSLEYMVKCL

SEQ ID NO: 1350 - protein, 14 aa, synthetic construct
YCEGHSLEHIAKCL

SEQ ID NO: 1351 - protein, 14 aa, synthetic construct
YCEGHTPVYMPKCL

SEQ ID NO: 1352 - protein, 14 aa, synthetic construct
YCQGHIEPYLAKCL

SEQ ID NO: 1353 - protein, 14 aa, synthetic construct
YCDGHLAIYMWKCL

SEQ ID NO: 1354 - protein, 14 aa, synthetic construct
YCDGHAEEYMAKCL

SEQ ID NO: 1355 - protein, 14 aa, synthetic construct
YCDGHSLQYMSKCL

SEQ ID NO: 1356 - protein, 14 aa, synthetic construct
YCEGHLPQYMTKCI

SEQ ID NO: 1357 - protein, 14 aa, synthetic construct
YCAGHLPQYIQKCL

SEQ ID NO: 1358 - protein, 14 aa, synthetic construct
YCEGHLAIYQKKCL

SEQ ID NO: 1359 - protein, 14 aa, synthetic construct
YCEGHAVEYMAKCL

SEQ ID NO: 1360 - protein, 14 aa, synthetic construct
YCEGHLPIYMEKCL

SEQ ID NO: 1361 - protein, 14 aa, synthetic construct
YCEGHSMEYIQKCL

SEQ ID NO: 1362 - protein, 14 aa, synthetic construct
YCEGHSQEYMAKCL

SEQ ID NO: 1363 - protein, 14 aa, synthetic construct
YCDGHLPEYMNQCL

SEQ ID NO: 1364 - protein, 14 aa, synthetic construct
YCDGHNFQYMEKCL

SEQ ID NO: 1365 - protein, 14 aa, synthetic construct
YCVGHLPQYMQKCL

SEQ ID NO: 1366 - protein, 14 aa, synthetic construct
YCDGHLPEYIAKCQ

SEQ ID NO: 1367 - protein, 14 aa, synthetic construct
YCDGHSLEYIEKCL

SEQ ID NO: 1368 - protein, 14 aa, synthetic construct
YCLGHSWPYIHKCY

SEQ ID NO: 1369 - protein, 14 aa, synthetic construct
YCDGHLDEYMLKCL

SEQ ID NO: 1370 - protein, 14 aa, synthetic construct
YCDGHTPEYMWKCL

SEQ ID NO: 1371 - protein, 14 aa, synthetic construct
YCEGHSQQYMQKCL

SEQ ID NO: 1372 - protein, 14 aa, synthetic construct
YCDGHSPAFIQKCL

SEQ ID NO: 1373 - protein, 14 aa, synthetic construct
YCDGHSLEYIDKCM

SEQ ID NO: 1374 - protein, 14 aa, synthetic construct
YCQGHSPNYITKCF

SEQ ID NO: 1375 - protein, 14 aa, synthetic construct
YCDGHAPEYLGKCL

SEQ ID NO: 1376 - protein, 14 aa, synthetic construct
YCAGHAEEYLEKCL

SEQ ID NO: 1377 - protein, 14 aa, synthetic construct
YCDGHSHEYMQKCL

SEQ ID NO: 1378 - protein, 14 aa, synthetic construct
YCAGHSAEYMSKCL

SEQ ID NO: 1379 - protein, 14 aa, synthetic construct
YCDGHLMEYKAKCL

SEQ ID NO: 1380 - protein, 14 aa, synthetic construct
YCEGHSAEYIAKCL

SEQ ID NO: 1381 - protein, 14 aa, synthetic construct
YCDGHSPEHMGKCL

SEQ ID NO: 1382 - protein, 14 aa, synthetic construct
YCDGHDARYMEKCL

SEQ ID NO: 1383 - protein, 14 aa, synthetic construct
YCDGHSPEYMQKCL

SEQ ID NO: 1384 - protein, 14 aa, synthetic construct
YCNGHLPEYMSKCI

SEQ ID NO: 1385 - protein, 14 aa, synthetic construct
YCSGHLPEYMDKCL

SEQ ID NO: 1386 - protein, 14 aa, synthetic construct
YCDGHSLEYMLKCL

SEQ ID NO: 1387 - protein, 14 aa, synthetic construct
YCEGHHPWYVQKCL

SEQ ID NO: 1388 - protein, 14 aa, synthetic construct
YCDGHNWEYMEKCL

SEQ ID NO: 1389 - protein, 14 aa, synthetic construct
YCDGHAEQYMSKCL

SEQ ID NO: 1390 - protein, 14 aa, synthetic construct
YCDGLFQLYMMKCL

SEQ ID NO: 1391 - protein, 14 aa, synthetic construct
YCDGHAPEYIQKCL

SEQ ID NO: 1392 - protein, 14 aa, synthetic construct
YCEGHLDEYLQKCL

SEQ ID NO: 1393 - protein, 14 aa, synthetic construct
YCDGHLQEYMQKCL

SEQ ID NO: 1394 - protein, 14 aa, synthetic construct
YCDGHQPQYMSKCL

SEQ ID NO: 1395 - protein, 14 aa, synthetic construct
YCDGHLSEYIGKCL

SEQ ID NO: 1396 - protein, 14 aa, synthetic construct
YCEGHSQLYMAKCL

SEQ ID NO: 1397 - protein, 14 aa, synthetic construct
YCDGHSETYLWKCL

SEQ ID NO: 1398 - protein, 14 aa, synthetic construct
YCEGHLPAYMGKCI

SEQ ID NO: 1399 - protein, 14 aa, synthetic construct
YCEGHLPEYMIKCI

SEQ ID NO: 1400 - protein, 14 aa, synthetic construct
YCAGHTSEYMSKCL

SEQ ID NO: 1401 - protein, 14 aa, synthetic construct
YCDGHMKEYMLKCL

SEQ ID NO: 1402 - protein, 14 aa, synthetic construct
YCDGHVKEYMYKCL

SEQ ID NO: 1403 - protein, 14 aa, synthetic construct
YCDGHLALYMWKCL

SEQ ID NO: 1404 - protein, 14 aa, synthetic construct
YCDGHLSIYMTKCL

SEQ ID NO: 1405 - protein, 14 aa, synthetic construct
YCDGHMVQYMAKCL

SEQ ID NO: 1406 - protein, 14 aa, synthetic construct
YCDGHSEEFMWKCL

SEQ ID NO: 1407 - protein, 14 aa, synthetic construct
YCEGHMEKYMEKCL

SEQ ID NO: 1408 - protein, 14 aa, synthetic construct
YCDGHLPRYMAKCL

SEQ ID NO: 1409 - protein, 14 aa, synthetic construct
YCDGHLPEYMQKCL

SEQ ID NO: 1410 - protein, 14 aa, synthetic construct
YCDGHLLQYMHKCL

SEQ ID NO: 1411 - protein, 14 aa, synthetic construct
YCDGHAPLYIQKCL

SEQ ID NO: 1412 - protein, 14 aa, synthetic construct
YCDGHSKEYMAKCL

SEQ ID NO: 1413 - protein, 14 aa, synthetic construct
YCEGHSPEYMHKCL

SEQ ID NO: 1414 - protein, 14 aa, synthetic construct
YCDGHSEAYIEKCL

SEQ ID NO: 1415 - protein, 14 aa, synthetic construct
YCAGHVDQYLWKCL

SEQ ID NO: 1416 - protein, 14 aa, synthetic construct
YCAGHASEYMAKCL

SEQ ID NO: 1417 - protein, 14 aa, synthetic construct
YCDGHAPQYMRKCL

SEQ ID NO: 1418 - protein, 14 aa, synthetic construct
YCDGHLPLYMQKCF

SEQ ID NO: 1419 - protein, 14 aa, synthetic construct
YCAGHLPMYMQKCL

SEQ ID NO: 1420 - protein, 14 aa, synthetic construct
YCSEHQIIFIQKCL

SEQ ID NO: 1421 - protein, 14 aa, synthetic construct
YCEGHLEIYLAKCL

SEQ ID NO: 1422 - protein, 14 aa, synthetic construct
YCDGHTAEFIGKCL

SEQ ID NO: 1423 - protein, 14 aa, synthetic construct
YCAGHALEYMGKCL

SEQ ID NO: 1424 - protein, 14 aa, synthetic construct
YCEGHLPEYMIKCL

SEQ ID NO: 1425 - protein, 14 aa, synthetic construct
YCEGHLPAYMWKCL

SEQ ID NO: 1426 - protein, 14 aa, synthetic construct
YCEGHLPMYMQKCL

SEQ ID NO: 1427 - protein, 14 aa, synthetic construct
YCDGHIPEYMTKCL

SEQ ID NO: 1428 - protein, 14 aa, synthetic construct
YCDGHSAEYIAKCL

SEQ ID NO: 1429 - protein, 14 aa, synthetic construct
YCEGHSAVYMSKCL

SEQ ID NO: 1430 - protein, 14 aa, synthetic construct
YCEGHSLEYMMKCV

SEQ ID NO: 1431 - protein, 14 aa, synthetic construct
YCDGHAPQYMAKCI

SEQ ID NO: 1432 - protein, 14 aa, synthetic construct
YCQGHSVEHMAKCL

SEQ ID NO: 1433 - protein, 14 aa, synthetic construct
YCAGHMPIYMTKCL

SEQ ID NO: 1434 - protein, 14 aa, synthetic construct
YCDGHRAEYMLKCL

SEQ ID NO: 1435 - protein, 14 aa, synthetic construct
YCEGHLVQYMQKCL

SEQ ID NO: 1436 - protein, 14 aa, synthetic construct
YCMGHLPIYMEKCL

SEQ ID NO: 1437 - protein, 14 aa, synthetic construct
YCEGHLPRYMLKCL

SEQ ID NO: 1438 - protein, 14 aa, synthetic construct
YCDGHLEVYMDKCL

SEQ ID NO: 1439 - protein, 14 aa, synthetic construct
YCDGHSPAYLQKCL

SEQ ID NO: 1440 - protein, 14 aa, synthetic construct
YCEGHSSQWMWKCL

SEQ ID NO: 1441 - protein, 14 aa, synthetic construct
YCEGHFPLYMNKCL

SEQ ID NO: 1442 - protein, 14 aa, synthetic construct
YCEGHSTEYMAKCL

SEQ ID NO: 1443 - protein, 14 aa, synthetic construct
YCEGHQPAYMEKCL

SEQ ID NO: 1444 - protein, 14 aa, synthetic construct
YCDGHAEEYRMKCL

SEQ ID NO: 1445 - protein, 14 aa, synthetic construct
YCDGHLPVYMTKCL

SEQ ID NO: 1446 - protein, 14 aa, synthetic construct
YCDGHSSVYMLKCL

SEQ ID NO: 1447 - protein, 14 aa, synthetic construct
YCEGHHRIYMQKCL

SEQ ID NO: 1448 - protein, 14 aa, synthetic construct
YCEGHSEEYMAKCL

SEQ ID NO: 1449 - protein, 14 aa, synthetic construct
YCEGHMSIYMQKCL

SEQ ID NO: 1450 - protein, 14 aa, synthetic construct
YCEGHLQEHMAKCL

SEQ ID NO: 1451 - protein, 14 aa, synthetic construct
YCAGLFEEYMSKCL

SEQ ID NO: 1452 - protein, 14 aa, synthetic construct
YCEGHLPMYMTKCL

SEQ ID NO: 1453 - protein, 14 aa, synthetic construct
YCDGHSEQYMAKCL

SEQ ID NO: 1454 - protein, 14 aa, synthetic construct
YCEGHTQEYMQKCL

SEQ ID NO: 1455 - protein, 14 aa, synthetic construct
YCAGHTAEYMAKCL

SEQ ID NO: 1456 - protein, 14 aa, synthetic construct
YCEGHLAEYMNKCL

SEQ ID NO: 1457 - protein, 14 aa, synthetic construct
YCDGHVEEYMTKCL

SEQ ID NO: 1458 - protein, 14 aa, synthetic construct
YCDGHLEQYMLKCL

SEQ ID NO: 1459 - protein, 14 aa, synthetic construct
YCEGHIGIYMSKCL

SEQ ID NO: 1460 - protein, 14 aa, synthetic construct
YCEGHSTEYIQKCL

SEQ ID NO: 1461 - protein, 14 aa, synthetic construct
YCDGHSMMYMQKCL

SEQ ID NO: 1462 - protein, 14 aa, synthetic construct
YCEGHSAEHMPKCL

SEQ ID NO: 1463 - protein, 14 aa, synthetic construct
YCVGHYPEYMEKCL

SEQ ID NO: 1464 - protein, 14 aa, synthetic construct
YCDGHEARYMQKCL

SEQ ID NO: 1465 - protein, 14 aa, synthetic construct
YCDGHSQEYMSKCL

SEQ ID NO: 1466 - protein, 14 aa, synthetic construct
YCHGHLPQYMSKCM

SEQ ID NO: 1467 - protein, 14 aa, synthetic construct
YCAGHLDIYLAKCL

SEQ ID NO: 1468 - protein, 14 aa, synthetic construct
YCAGHAPEYISKCL

SEQ ID NO: 1469 - protein, 14 aa, synthetic construct
YCDGHSWEYLGKCL

SEQ ID NO: 1470 - protein, 14 aa, synthetic construct
YCEGHAAEYLWKCL

SEQ ID NO: 1471 - protein, 14 aa, synthetic construct
YCDGHRPEYMSKCL

SEQ ID NO: 1472 - protein, 14 aa, synthetic construct
YCEGHMPEYLAKCL

SEQ ID NO: 1473 - protein, 14 aa, synthetic construct
YCEGHAGVYMAKCL

SEQ ID NO: 1474 - protein, 14 aa, synthetic construct
YCEGHSQTYMWKCL

SEQ ID NO: 1475 - protein, 14 aa, synthetic construct
YCAGHSSEYIGKCL

SEQ ID NO: 1476 - protein, 14 aa, synthetic construct
YCEGHSQQYMWKCL

SEQ ID NO: 1477 - protein, 14 aa, synthetic construct
YCDGHLPDYMAKCL

SEQ ID NO: 1478 - protein, 14 aa, synthetic construct
YCEGHAEQYMEKCL

SEQ ID NO: 1479 - protein, 14 aa, synthetic construct
YCEGHLKEYMQKCL

SEQ ID NO: 1480 - protein, 14 aa, synthetic construct
YCEGHSYQYMQKCL

SEQ ID NO: 1481 - protein, 14 aa, synthetic construct
YCEGHRAEYMSKCL

SEQ ID NO: 1482 - protein, 14 aa, synthetic construct
YCDGHSWIYMVKCL

SEQ ID NO: 1483 - protein, 14 aa, synthetic construct
YCDGHLSVYMSKCL

SEQ ID NO: 1484 - protein, 14 aa, synthetic construct
YCEGHLPQYMSKCL

SEQ ID NO: 1485 - protein, 14 aa, synthetic construct
YCEGHVAEYRAKCL

SEQ ID NO: 1486 - protein, 14 aa, synthetic construct
YCQGHLPQYIEKCL

SEQ ID NO: 1487 - protein, 14 aa, synthetic construct
YCEGHAAAYMGKCL

SEQ ID NO: 1488 - protein, 14 aa, synthetic construct
YCDGHEQQYMEKCL

SEQ ID NO: 1489 - protein, 14 aa, synthetic construct
YCDGHLQMYMMKCL

SEQ ID NO: 1490 - protein, 14 aa, synthetic construct
YCEGHLYEYMWKCL

SEQ ID NO: 1491 - protein, 14 aa, synthetic construct
YCVGHSEQYMAKCL

SEQ ID NO: 1492 - protein, 14 aa, synthetic construct
YCDGHEAEYMWKCL

SEQ ID NO: 1493 - protein, 14 aa, synthetic construct
YCEGHAEQYMKKCL

SEQ ID NO: 1494 - protein, 14 aa, synthetic construct
YCDGHVVEYMSKCL

SEQ ID NO: 1495 - protein, 14 aa, synthetic construct
YCAGHLPQYMHKCL

SEQ ID NO: 1496 - protein, 14 aa, synthetic construct
YCDGHIWPWIEKCL

SEQ ID NO: 1497 - protein, 14 aa, synthetic construct
YCEGHSSLYLEKCL

SEQ ID NO: 1498 - protein, 14 aa, synthetic construct
YCDGHAMEYMEKCL

SEQ ID NO: 1499 - protein, 14 aa, synthetic construct
YCEGHLWEYLAKCL

SEQ ID NO: 1500 - protein, 14 aa, synthetic construct
YCEGHMGEYMLKCL

SEQ ID NO: 1501 - protein, 14 aa, synthetic construct
YCDGHTKEYMWKCL

SEQ ID NO: 1502 - protein, 14 aa, synthetic construct
YCAGHAEEYMLKCL

SEQ ID NO: 1503 - protein, 14 aa, synthetic construct
YCEGHSAEYIGKCL

SEQ ID NO: 1504 - protein, 14 aa, synthetic construct
YCVGHLPEYMLECM

SEQ ID NO: 1505 - protein, 14 aa, synthetic construct
YCDGHSFHYMAKCL

SEQ ID NO: 1506 - protein, 14 aa, synthetic construct
YCEGHSEMYMSKCL

SEQ ID NO: 1507 - protein, 14 aa, synthetic construct
YCDGHANAYIWKCL

SEQ ID NO: 1508 - protein, 14 aa, synthetic construct
YCEGHIPMYMLKCM

SEQ ID NO: 1509 - protein, 14 aa, synthetic construct
YCEGHAQEYMAKCL

SEQ ID NO: 1510 - protein, 14 aa, synthetic construct
YCDGHAKVYIWKCL

SEQ ID NO: 1511 - protein, 14 aa, synthetic construct
YCEGHIPAYMAKCL

SEQ ID NO: 1512 - protein, 14 aa, synthetic construct
YCDGHAPIYMQKCL

SEQ ID NO: 1513 - protein, 14 aa, synthetic construct
YCEGHLWEYMKKCL

SEQ ID NO: 1514 - protein, 14 aa, synthetic construct
YCEGHDVQYMQKCL

SEQ ID NO: 1515 - protein, 14 aa, synthetic construct
YCEGHSSEYLGKCL

SEQ ID NO: 1516 - protein, 14 aa, synthetic construct
YCDGHLPRYMEKCM

SEQ ID NO: 1517 - protein, 14 aa, synthetic construct
YCDGHSSAYIDKCL

SEQ ID NO: 1518 - protein, 14 aa, synthetic construct
YCEGHLPSYLAKCL

SEQ ID NO: 1519 - protein, 14 aa, synthetic construct
YCDGHAPEFIRKCL

SEQ ID NO: 1520 - protein, 14 aa, synthetic construct
YCEGHAPQYMSKCL

SEQ ID NO: 1521 - protein, 14 aa, synthetic construct
YCDGHDARYMTKCL

SEQ ID NO: 1522 - protein, 14 aa, synthetic construct
YCEGHSVEYILKCL

SEQ ID NO: 1523 - protein, 14 aa, synthetic construct
YCEGHSSAYMRKCL

SEQ ID NO: 1524 - protein, 14 aa, synthetic construct
YCDGHLAEYIQKCL

SEQ ID NO: 1525 - protein, 14 aa, synthetic construct
YCAGHSSEYLQKCL

SEQ ID NO: 1526 - protein, 14 aa, synthetic construct
YCAGHSQVYMWKCL

SEQ ID NO: 1527 - protein, 14 aa, synthetic construct
YCEGHIEQYMRKCL

SEQ ID NO: 1528 - protein, 14 aa, synthetic construct
YCFGHAPEYLLKCL

SEQ ID NO: 1529 - protein, 14 aa, synthetic construct
YCEGHLREYMLKCL

SEQ ID NO: 1530 - protein, 14 aa, synthetic construct
YCEGHSSVYLWKCL

SEQ ID NO: 1531 - protein, 14 aa, synthetic construct
YCEGHSWIYIAKCL

SEQ ID NO: 1532 - protein, 14 aa, synthetic construct
YCDGHLEVYMSKCL

SEQ ID NO: 1533 - protein, 14 aa, synthetic construct
YCEGHRPEYMANCL

SEQ ID NO: 1534 - protein, 14 aa, synthetic construct
YCEGHIEPYMQKCL

SEQ ID NO: 1535 - protein, 14 aa, synthetic construct
YCDGHKPEYMDKCL

SEQ ID NO: 1536 - protein, 14 aa, synthetic construct
YCDGHVGAYMWKCL

SEQ ID NO: 1537 - protein, 14 aa, synthetic construct
YCEGHSAIYIAKCM

SEQ ID NO: 1538 - protein, 14 aa, synthetic construct
YCFGHFPEYMAKCL

SEQ ID NO: 1539 - protein, 14 aa, synthetic construct
YCDGHTGMYISKCL

SEQ ID NO: 1540 - protein, 14 aa, synthetic construct
YCSGHSWAYIGKCL

SEQ ID NO: 1541 - protein, 14 aa, synthetic construct
YCAGHAAEYMWKCL

SEQ ID NO: 1542 - protein, 14 aa, synthetic construct
YCQGHFPQYMAKCL

SEQ ID NO: 1543 - protein, 14 aa, synthetic construct
YCEGHVPEYLVKCL

SEQ ID NO: 1544 - protein, 14 aa, synthetic construct
YCDGHSKEYMSKCL

SEQ ID NO: 1545 - protein, 14 aa, synthetic construct
YCDGHLPEYMLKCL

SEQ ID NO: 1546 - protein, 14 aa, synthetic construct
YCAGHLDVYMSKCL

SEQ ID NO: 1547 - protein, 14 aa, synthetic construct
YCAGHTPEYLDKCL

SEQ ID NO: 1548 - protein, 14 aa, synthetic construct
YCEGHDIRYMMKCL

SEQ ID NO: 1549 - protein, 14 aa, synthetic construct
YCDGHEERYMAKCL

SEQ ID NO: 1550 - protein, 14 aa, synthetic construct
YCSGHVPEYMEKCL

SEQ ID NO: 1551 - protein, 14 aa, synthetic construct
YCDGHIPQYVEKCL

SEQ ID NO: 1552 - protein, 14 aa, synthetic construct
YCAGHAEIYMQKCL

SEQ ID NO: 1553 - protein, 14 aa, synthetic construct
YCEGHAHEYMEKCV

SEQ ID NO: 1554 - protein, 14 aa, synthetic construct
YCDGHHAEYMWKCL

SEQ ID NO: 1555 - protein, 14 aa, synthetic construct
YCEGHTQAYLAKCL

SEQ ID NO: 1556 - protein, 14 aa, synthetic construct
YCAGHSAQYMWKCL

SEQ ID NO: 1557 - protein, 14 aa, synthetic construct
YCDGHSFEYMAKCL

SEQ ID NO: 1558 - protein, 14 aa, synthetic construct
YCDGHSAEYLGKCL

SEQ ID NO: 1559 - protein, 14 aa, synthetic construct
YCVGHSPEYIWKCL

SEQ ID NO: 1560 - protein, 14 aa, synthetic construct
YCDGHELMYMEKCL

SEQ ID NO: 1561 - protein, 14 aa, synthetic construct
YCAGHLEMYMSKCL

SEQ ID NO: 1562 - protein, 14 aa, synthetic construct
YCDGHIKEYMSKCL

SEQ ID NO: 1563 - protein, 14 aa, synthetic construct
YCDGHLLMYMEKCL

SEQ ID NO: 1564 - protein, 14 aa, synthetic construct
YCEGHDWMYMEKCL

SEQ ID NO: 1565 - protein, 14 aa, synthetic construct
YCEGHSQEYKAKCF

SEQ ID NO: 1566 - protein, 14 aa, synthetic construct
YCDGHVLMYLAKCL

SEQ ID NO: 1567 - protein, 14 aa, synthetic construct
YCEGHSSAYMAKCL

SEQ ID NO: 1568 - protein, 14 aa, synthetic construct
YCEGHLAAYMYKCL

SEQ ID NO: 1569 - protein, 14 aa, synthetic construct
YCDGHSTLYMQKCL

SEQ ID NO: 1570 - protein, 14 aa, synthetic construct
YCDGHTEAYMSKCL

SEQ ID NO: 1571 - protein, 14 aa, synthetic construct
YCEGHISEYMGKCL

SEQ ID NO: 1572 - protein, 14 aa, synthetic construct
YCDGHFTWYMAKCL

SEQ ID NO: 1573 - protein, 14 aa, synthetic construct
YCDGHIAEYRSKCL

SEQ ID NO: 1574 - protein, 14 aa, synthetic construct
YCEGHLSEYIGKCL

SEQ ID NO: 1575 - protein, 14 aa, synthetic construct
YCDGHTAQYMWKCL

SEQ ID NO: 1576 - protein, 14 aa, synthetic construct
YCAGHSLQYLGKCY

SEQ ID NO: 1577 - protein, 14 aa, synthetic construct
YCAGHAAIYMAKCL

SEQ ID NO: 1578 - protein, 14 aa, synthetic construct
YCDGHSMTYMAKCI

SEQ ID NO: 1579 - protein, 14 aa, synthetic construct
YCDGHKWEYLQKCL

SEQ ID NO: 1580 - protein, 14 aa, synthetic construct
YCDGHDPQYIRKCI

SEQ ID NO: 1581 - protein, 14 aa, synthetic construct
YCEGHLPMYMQKCM

SEQ ID NO: 1582 - protein, 14 aa, synthetic construct
YCDGHSGEYMSKCL

SEQ ID NO: 1583 - protein, 14 aa, synthetic construct
YCEGHAREYMDKCL

SEQ ID NO: 1584 - protein, 14 aa, synthetic construct
YCDGHSMEYMAKCL

SEQ ID NO: 1585 - protein, 14 aa, synthetic construct
YCDGHSPQYLWKCL

SEQ ID NO: 1586 - protein, 14 aa, synthetic construct
YCAGHSAEYIQKCL

SEQ ID NO: 1587 - protein, 14 aa, synthetic construct
YCAGHTQEYMLKCL

SEQ ID NO: 1588 - protein, 14 aa, synthetic construct
YCQGHSVQYMAKCL

SEQ ID NO: 1589 - protein, 14 aa, synthetic construct
YCEGHSSEYMVKCL

SEQ ID NO: 1590 - protein, 14 aa, synthetic construct
YCDGHTGVYKWKCI

SEQ ID NO: 1591 - protein, 14 aa, synthetic construct
YCAGHIGEYMDKCL

SEQ ID NO: 1592 - protein, 14 aa, synthetic construct
YCDGHAGIYVLKCL

SEQ ID NO: 1593 - protein, 14 aa, synthetic construct
YCDGHNPVYLAKCL

SEQ ID NO: 1594 - protein, 14 aa, synthetic construct
YCEGHAQQYMLKCL

SEQ ID NO: 1595 - protein, 14 aa, synthetic construct
YCAGHSVQYMYKCL

SEQ ID NO: 1596 - protein, 14 aa, synthetic construct
YCEGHFGMYMSKCL

SEQ ID NO: 1597 - protein, 14 aa, synthetic construct
YCAGHMPQYMSKCL

SEQ ID NO: 1598 - protein, 14 aa, synthetic construct
YCQGHALQYLQKCL

SEQ ID NO: 1599 - protein, 14 aa, synthetic construct
YCAGHLPQYVSKCL

SEQ ID NO: 1600 - protein, 14 aa, synthetic construct
YCEGHLPWYMSKCL

SEQ ID NO: 1601 - protein, 14 aa, synthetic construct
YCDGHHLEYIDKCL

SEQ ID NO: 1602 - protein, 14 aa, synthetic construct
YCDGHLPRFMVKCL

SEQ ID NO: 1603 - protein, 14 aa, synthetic construct
YCQGHAPWYMVKCL

SEQ ID NO: 1604 - protein, 14 aa, synthetic construct
YCEGHMSEYMRKCL

SEQ ID NO: 1605 - protein, 14 aa, synthetic construct
YCVGHLPLYMPNCL

SEQ ID NO: 1606 - protein, 14 aa, synthetic construct
YCDGHEPQYMTKCL

SEQ ID NO: 1607 - protein, 14 aa, synthetic construct
YCEGHLPQYLAKCY

SEQ ID NO: 1608 - protein, 14 aa, synthetic construct
YCDGHYGAYILKCL

SEQ ID NO: 1609 - protein, 14 aa, synthetic construct
YCEGHAAVYMHKCL

SEQ ID NO: 1610 - protein, 14 aa, synthetic construct
YCDGHMDAYMSKCL

SEQ ID NO: 1611 - protein, 14 aa, synthetic construct
YCMGHSAEYMGKCL

SEQ ID NO: 1612 - protein, 14 aa, synthetic construct
YCDGHAWWYMEKCL

SEQ ID NO: 1613 - protein, 14 aa, synthetic construct
YCDGHAAWYLQKCL

SEQ ID NO: 1614 - protein, 14 aa, synthetic construct
YCEGHAQMYMLKCL

SEQ ID NO: 1615 - protein, 14 aa, synthetic construct
YCEGHSRQYMEKCM

SEQ ID NO: 1616 - protein, 14 aa, synthetic construct
YCSGHLPMYMAKCL

SEQ ID NO: 1617 - protein, 14 aa, synthetic construct
YCEGHLAVHMSKCL

SEQ ID NO: 1618 - protein, 14 aa, synthetic construct
YCDGHIEMYMSKCM

SEQ ID NO: 1619 - protein, 14 aa, synthetic construct
YCAGHALEYMQKCM

SEQ ID NO: 1620 - protein, 14 aa, synthetic construct
YCEGHIGDYIAKCL

SEQ ID NO: 1621 - protein, 14 aa, synthetic construct
YCQGHSELYMSKCL

SEQ ID NO: 1622 - protein, 14 aa, synthetic construct
YCDGHTPQFRAKCL

SEQ ID NO: 1623 - protein, 14 aa, synthetic construct
YCEGHLQEYMGKCL

SEQ ID NO: 1624 - protein, 14 aa, synthetic construct
YCDGHVTEYMAKCL

SEQ ID NO: 1625 - protein, 14 aa, synthetic construct
YCDGHIMPYLDKCL

SEQ ID NO: 1626 - protein, 14 aa, synthetic construct
YCEGHKKEYMLKCL

SEQ ID NO: 1627 - protein, 14 aa, synthetic construct
YCEGHVELYRQKCL

SEQ ID NO: 1628 - protein, 14 aa, synthetic construct
YCDGHLETYMQKCL

SEQ ID NO: 1629 - protein, 14 aa, synthetic construct
YCQGHLPIYIQKCL

SEQ ID NO: 1630 - protein, 14 aa, synthetic construct
YCEGHLDEYLQKCM

SEQ ID NO: 1631 - protein, 14 aa, synthetic construct
YCAGHTTEYIVKCL

SEQ ID NO: 1632 - protein, 14 aa, synthetic construct
YCEGHVPQYMGKCL

SEQ ID NO: 1633 - protein, 14 aa, synthetic construct
YCDGHAAMYMSKCL

SEQ ID NO: 1634 - protein, 14 aa, synthetic construct
YCEGHLGLYMKKCL

SEQ ID NO: 1635 - protein, 14 aa, synthetic construct
YCAGHAQEYMRKCL

SEQ ID NO: 1636 - protein, 14 aa, synthetic construct
YCAGHIPQYLNKCL

SEQ ID NO: 1637 - protein, 14 aa, synthetic construct
YCDGHSTEYMWKCL

SEQ ID NO: 1638 - protein, 14 aa, synthetic construct
YCEGHIKDYMTKCL

SEQ ID NO: 1639 - protein, 14 aa, synthetic construct
YCAGHDAEYMQKCL

SEQ ID NO: 1640 - protein, 14 aa, synthetic construct
YCEGHMQWYMAKCL

SEQ ID NO: 1641 - protein, 14 aa, synthetic construct
YCEGHAPVYMQKCL

SEQ ID NO: 1642 - protein, 14 aa, synthetic construct
YCDGHDEQYLMKCL

SEQ ID NO: 1643 - protein, 14 aa, synthetic construct
YCDGHLPEYMEKCL

SEQ ID NO: 1644 - protein, 14 aa, synthetic construct
YCAGHASEYLQKCL

SEQ ID NO: 1645 - protein, 14 aa, synthetic construct
YCDGHSQIYMSKCL

SEQ ID NO: 1646 - protein, 14 aa, synthetic construct
YCDGHWPGYLWKCL

SEQ ID NO: 1647 - protein, 14 aa, synthetic construct
YCTGWQVAYMQNCF

SEQ ID NO: 1648 - protein, 14 aa, synthetic construct
YCAGHLDEYMEKCL

SEQ ID NO: 1649 - protein, 14 aa, synthetic construct
YCDGHTWMYKQKCL

SEQ ID NO: 1650 - protein, 14 aa, synthetic construct
TCSAGATWPWPICL

SEQ ID NO: 1651 - protein, 14 aa, synthetic construct
LCSAGAMWPWPTCL

SEQ ID NO: 1652 - protein, 14 aa, synthetic construct
LCSAGAMYSWPTCL

SEQ ID NO: 1653 - protein, 14 aa, synthetic construct
TCSAGATWPWPICL

SEQ ID NO: 1654 - protein, 14 aa, synthetic construct
TCAAGAMWAWPVCL

SEQ ID NO: 1655 - protein, 14 aa, synthetic construct
MCSAGAMYKWPLCL

SEQ ID NO: 1656 - protein, 14 aa, synthetic construct
TCSAGATYAWPFCL

SEQ ID NO: 1657 - protein, 14 aa, synthetic construct
MCAAGATYPWPACL

SEQ ID NO: 1658 - protein, 14 aa, synthetic construct
SCAAGAMWPWPVCV

SEQ ID NO: 1659 - protein, 14 aa, synthetic construct
TCSAGASYPWPLCL

SEQ ID NO: 1660 - protein, 14 aa, synthetic construct
SCKPGVANYWPWCL

SEQ ID NO: 1661 - protein, 14 aa, synthetic construct
MCSAGAMYSWPLCL

SEQ ID NO: 1662 - protein, 14 aa, synthetic construct
LCAAGATYPWPFCL

SEQ ID NO: 1663 - protein, 14 aa, synthetic construct
MCAAGANYPWPQCL

SEQ ID NO: 1664 - protein, 14 aa, synthetic construct
TCSAGATWSWPMCL

SEQ ID NO: 1665 - protein, 14 aa, synthetic construct
LCSAGAMYPWPTCL

SEQ ID NO: 1666 - protein, 14 aa, synthetic construct
TCAAGAHYSWPACF

SEQ ID NO: 1667 - protein, 14 aa, synthetic construct
TCAAGATYPWPSCL

SEQ ID NO: 1668 - protein, 14 aa, synthetic construct
RCAAGASYPWPPCL

SEQ ID NO: 1669 - protein, 14 aa, synthetic construct
TCKAGATYLWPFCL

SEQ ID NO: 1670 - protein, 14 aa, synthetic construct
MCAAGFHYPWPACL

SEQ ID NO: 1671 - protein, 14 aa, synthetic construct
TCAAGANWEWPWCF

SEQ ID NO: 1672 - protein, 14 aa, synthetic construct
TCAAGATYAWPYCV

SEQ ID NO: 1673 - protein, 14 aa, synthetic construct
TCAAGAAYPWPLCF

SEQ ID NO: 1674 - protein, 14 aa, synthetic construct
TCSAGASNKLSLCL

SEQ ID NO: 1675 - protein, 14 aa, synthetic construct
MCSAGANWPWPLCF

SEQ ID NO: 1676 - protein, 14 aa, synthetic construct
RCSAGFHYPLSLCL

SEQ ID NO: 1677 - protein, 14 aa, synthetic construct
NCSAGATYPWPLCL

SEQ ID NO: 1678 - protein, 14 aa, synthetic construct
SCAAGAMYSWPTCL

SEQ ID NO: 1679 - protein, 14 aa, synthetic construct
NCSAGAQWPWPICL

SEQ ID NO: 1680 - protein, 14 aa, synthetic construct
LCAAGAHYPWPQCL

SEQ ID NO: 1681 - protein, 14 aa, synthetic construct
TCAAGAHWPWPTCF

SEQ ID NO: 1682 - protein, 14 aa, synthetic construct
TCSAGATYTWSKCF

SEQ ID NO: 1683 - protein, 14 aa, synthetic construct
LCNAGATYSWPTCL

SEQ ID NO: 1684 - protein, 14 aa, synthetic construct
TCSAGATYTWPWCF

SEQ ID NO: 1685 - protein, 14 aa, synthetic construct
WCKPGAPYKWPPCF

SEQ ID NO: 1686 - protein, 14 aa, synthetic construct
TCAAGAMYTWPLCF

SEQ ID NO: 1687 - protein, 14 aa, synthetic construct
TCSAGATWTWPQCL

SEQ ID NO: 1688 - protein, 14 aa, synthetic construct
LCAAGATYAWPLCL

SEQ ID NO: 1689 - protein, 14 aa, synthetic construct
MCAEFFNYPWPLCL

SEQ ID NO: 1690 - protein, 14 aa, synthetic construct
TCAAGATYEWPACL

SEQ ID NO: 1691 - protein, 14 aa, synthetic construct
TCSAGAYYTWPYCF

SEQ ID NO: 1692 - protein, 14 aa, synthetic construct
TCAAVFSYGWPECF

SEQ ID NO: 1693 - protein, 14 aa, synthetic construct
SCSAGAMYTWPTCL

SEQ ID NO: 1694 - protein, 14 aa, synthetic construct
QCAAGASYPWPMCL

SEQ ID NO: 1695 - protein, 14 aa, synthetic construct
YCAAGATYPWPLCL

SEQ ID NO: 1696 - protein, 14 aa, synthetic construct
TCAAGATYAWPECL

SEQ ID NO: 1697 - protein, 14 aa, synthetic construct
TCSEGATYTWPWCF

SEQ ID NO: 1698 - protein, 14 aa, synthetic construct
TCAAGAHYLWPWCM

SEQ ID NO: 1699 - protein, 14 aa, synthetic construct
TCSAGATYVWPQCF

SEQ ID NO: 1700 - protein, 14 aa, synthetic construct
GCAAGATYPWPSCL

SEQ ID NO: 1701 - protein, 14 aa, synthetic construct
TCAAGATYKWPACL

SEQ ID NO: 1702 - protein, 14 aa, synthetic construct
MCSAGAMYPWPTCL

SEQ ID NO: 1703 - protein, 14 aa, synthetic construct
TCAAGASYAWPWCL

SEQ ID NO: 1704 - protein, 14 aa, synthetic construct
TCSAGASWAWPWCF

SEQ ID NO: 1705 - protein, 14 aa, synthetic construct
TCAAGAMWHWPVCL

SEQ ID NO: 1706 - protein, 14 aa, synthetic construct
TCSAGFHYEWPRCL

SEQ ID NO: 1707 - protein, 14 aa, synthetic construct
LCAAGFKYPWPLCL

SEQ ID NO: 1708 - protein, 14 aa, synthetic construct
LCEEFADYPWPMCL

SEQ ID NO: 1709 - protein, 14 aa, synthetic construct
TCAAGATYSWPMCF

SEQ ID NO: 1710 - protein, 14 aa, synthetic construct
LCAAGASYPWPTCL

SEQ ID NO: 1711 - protein, 14 aa, synthetic construct
HCAAGAHYPWPACL

SEQ ID NO: 1712 - protein, 14 aa, synthetic construct
TCAAGANYPWPYCL

SEQ ID NO: 1713 - protein, 14 aa, synthetic construct
MCAAGATYPWPLCL

SEQ ID NO: 1714 - protein, 14 aa, synthetic construct
TCAAGATYSWPWCF

SEQ ID NO: 1715 - protein, 14 aa, synthetic construct
TCAAGAHYTWPECF

SEQ ID NO: 1716 - protein, 14 aa, synthetic construct
SCAAVFSYSWPMCF

SEQ ID NO: 1717 - protein, 14 aa, synthetic construct
SCAAGATYSWPMCL

SEQ ID NO: 1718 - protein, 14 aa, synthetic construct
LCAEFFNYPWPLCL

SEQ ID NO: 1719 - protein, 14 aa, synthetic construct
QCSAGAAWPWPFCL

SEQ ID NO: 1720 - protein, 14 aa, synthetic construct
MCAAGAHYTWPTCL

SEQ ID NO: 1721 - protein, 14 aa, synthetic construct
TCSAGATYEWPWCM

SEQ ID NO: 1722 - protein, 14 aa, synthetic construct
MCSAGANYPWPWCL

SEQ ID NO: 1723 - protein, 14 aa, synthetic construct
TCAAGATYEWPYCF

SEQ ID NO: 1724 - protein, 14 aa, synthetic construct
WCAAVFSYTWSPCL

SEQ ID NO: 1725 - protein, 14 aa, synthetic construct
TCAAGAAYTWPACF

SEQ ID NO: 1726 - protein, 14 aa, synthetic construct
TCAAGATYEWPTCL

SEQ ID NO: 1727 - protein, 14 aa, synthetic construct
LCKPGVPNSWPTCL

SEQ ID NO: 1728 - protein, 14 aa, synthetic construct
TCSAGAHYPWPDCI

SEQ ID NO: 1729 - protein, 14 aa, synthetic construct
PCAAGAMWPWPVCL

SEQ ID NO: 1730 - protein, 14 aa, synthetic construct
LCNAGAMYKWPTCL

SEQ ID NO: 1731 - protein, 14 aa, synthetic construct
MCSAGAMYPWPLCL

SEQ ID NO: 1732 - protein, 14 aa, synthetic construct
TCSAGAMWTWPYCF

SEQ ID NO: 1733 - protein, 14 aa, synthetic construct
TCAAGAYWTWPACF

SEQ ID NO: 1734 - protein, 14 aa, synthetic construct
TCSAGAGYPWPLCY

SEQ ID NO: 1735 - protein, 14 aa, synthetic construct
SCSAGASLQLSICL

SEQ ID NO: 1736 - protein, 14 aa, synthetic construct
TCSAGATWAWPSCF

SEQ ID NO: 1737 - protein, 14 aa, synthetic construct
TCSAGAHYVWPMCF

SEQ ID NO: 1738 - protein, 14 aa, synthetic construct
TCSAGATYIWPMCF

SEQ ID NO: 1739 - protein, 14 aa, synthetic construct
TCRAGATYNWPFCL

SEQ ID NO: 1740 - protein, 14 aa, synthetic construct
TCSAGATWPWPICL

SEQ ID NO: 1741 - protein, 14 aa, synthetic construct
TCAAGASYPWPACL

SEQ ID NO: 1742 - protein, 14 aa, synthetic construct
SCAAVFSFPWSPCL

SEQ ID NO: 1743 - protein, 14 aa, synthetic construct
TCSAGFSYSWPACF

SEQ ID NO: 1744 - protein, 14 aa, synthetic construct
TCTAGFSYNWPMCF

SEQ ID NO: 1745 - protein, 14 aa, synthetic construct
TCSAGATYAWPACY

SEQ ID NO: 1746 - protein, 14 aa, synthetic construct
TCSAGATYSWPQCL

SEQ ID NO: 1747 - protein, 14 aa, synthetic construct
TCSAGAYYAWPVCL

SEQ ID NO: 1748 - protein, 14 aa, synthetic construct
LCRAGAMWPWPTCL

SEQ ID NO: 1749 - protein, 14 aa, synthetic construct
TCSAGATFHWPQCF

SEQ ID NO: 1750 - protein, 14 aa, synthetic construct
TCSAGAHYEWPYCL

SEQ ID NO: 1751 - protein, 14 aa, synthetic construct
QCAAGASYPWPVCL

SEQ ID NO: 1752 - protein, 14 aa, synthetic construct
LCKPGVPYQWPTCF

SEQ ID NO: 1753 - protein, 14 aa, synthetic construct
TCAAGAMWQWPVCL

SEQ ID NO: 1754 - protein, 14 aa, synthetic construct
PCSAGATYAWLYCV

SEQ ID NO: 1755 - protein, 14 aa, synthetic construct
SCAAGAMWPWPVCV

SEQ ID NO: 1756 - protein, 14 aa, synthetic construct
SCAAGAAYPWPACL

SEQ ID NO: 1757 - protein, 14 aa, synthetic construct
YCSAGAQWPWPICL

SEQ ID NO: 1758 - protein, 14 aa, synthetic construct
TCAAGASYQWPLCF

SEQ ID NO: 1759 - protein, 14 aa, synthetic construct
SCAAGASYSWPACF

SEQ ID NO: 1760 - protein, 14 aa, synthetic construct
SCSAGFHYPWPICL

SEQ ID NO: 1761 - protein, 14 aa, synthetic construct
LCKPGVPYQWPTCL

SEQ ID NO: 1762 - protein, 14 aa, synthetic construct
MCTAGALYNWPTCL

SEQ ID NO: 1763 - protein, 14 aa, synthetic construct
TCAAGAHYPWPYCL

SEQ ID NO: 1764 - protein, 14 aa, synthetic construct
WCAEFFNYHWPLCF

SEQ ID NO: 1765 - protein, 14 aa, synthetic construct
TCSAGFSLQLSICL

SEQ ID NO: 1766 - protein, 14 aa, synthetic construct
SCAAGASYPWPQCL

SEQ ID NO: 1767 - protein, 14 aa, synthetic construct
LCTAGLAYNWPTCL

SEQ ID NO: 1768 - protein, 14 aa, synthetic construct
GCAAGAHYPWPFCL

SEQ ID NO: 1769 - protein, 14 aa, synthetic construct
TCAAGAVWEWPMCF

SEQ ID NO: 1770 - protein, 14 aa, synthetic construct
TCAAGANYPWPLCL

SEQ ID NO: 1771 - protein, 14 aa, synthetic construct
MCAAGAMYAWPTCL

SEQ ID NO: 1772 - protein, 14 aa, synthetic construct
TCAAGASFPWPWCL

SEQ ID NO: 1773 - protein, 14 aa, synthetic construct
SCAAVFPYPWPPCF

SEQ ID NO: 1774 - protein, 14 aa, synthetic construct
TCSAGAMYPWPWCV

SEQ ID NO: 1775 - protein, 14 aa, synthetic construct
WCAAVFSYSWPLCL

SEQ ID NO: 1776 - protein, 14 aa, synthetic construct
GCAAGFHYPWPLCL

SEQ ID NO: 1777 - protein, 14 aa, synthetic construct
LCEEFFHYSWPVCL

SEQ ID NO: 1778 - protein, 14 aa, synthetic construct
TCAAGAAWPWPHCL

SEQ ID NO: 1779 - protein, 14 aa, synthetic construct
QCAAGAMWTWPACF

SEQ ID NO: 1780 - protein, 14 aa, synthetic construct
MCSAGATYPWPMCL

SEQ ID NO: 1781 - protein, 14 aa, synthetic construct
TCAAGATYPWPSCL

SEQ ID NO: 1782 - protein, 14 aa, synthetic construct
TCAAGAVWGWPLCF

SEQ ID NO: 1783 - protein, 14 aa, synthetic construct
TCAAGAHYAWPECF

SEQ ID NO: 1784 - protein, 14 aa, synthetic construct
RCRAGFSYNWPYCM

SEQ ID NO: 1785 - protein, 14 aa, synthetic construct
WCAAGATWPWPLCI

SEQ ID NO: 1786 - protein, 14 aa, synthetic construct
RCAAGVMYDWPVCL

SEQ ID NO: 1787 - protein, 14 aa, synthetic construct
TCSAGAHWTWPLCF

SEQ ID NO: 1788 - protein, 14 aa, synthetic construct
TCSAGAHFAWPMCF

SEQ ID NO: 1789 - protein, 14 aa, synthetic construct
SCAAGAHYVWPFCF

SEQ ID NO: 1790 - protein, 14 aa, synthetic construct
TCSAGATYNWPWCF

SEQ ID NO: 1791 - protein, 14 aa, synthetic construct
TCSAGASYPWPVCL

SEQ ID NO: 1792 - protein, 14 aa, synthetic construct
WCAAGAMYPWPLCL

SEQ ID NO: 1793 - protein, 14 aa, synthetic construct
LCNAGAPYKWPTCL

SEQ ID NO: 1794 - protein, 14 aa, synthetic construct
LCSAGAMYPWPLCY

SEQ ID NO: 1795 - protein, 14 aa, synthetic construct
TCAAGAMWVWPTCL

SEQ ID NO: 1796 - protein, 14 aa, synthetic construct
LCAAGANYPWPACL

SEQ ID NO: 1797 - protein, 14 aa, synthetic construct
SCAAGATYTWPMCI

SEQ ID NO: 1798 - protein, 14 aa, synthetic construct
SCAAGLSYPWPDCL

SEQ ID NO: 1799 - protein, 14 aa, synthetic construct
TCAAGAGWAWPFCF

SEQ ID NO: 1800 - protein, 14 aa, synthetic construct
MCSAGATYPWPYCL

SEQ ID NO: 1801 - protein, 14 aa, synthetic construct
LCSAGATYPWPWCM

SEQ ID NO: 1802 - protein, 14 aa, synthetic construct
DCWGDAPYPWRVCL

SEQ ID NO: 1803 - protein, 14 aa, synthetic construct
WCTAGFSYKLSICL

SEQ ID NO: 1804 - protein, 14 aa, synthetic construct
LCSAGAMYQWPTCL

SEQ ID NO: 1805 - protein, 14 aa, synthetic construct
TCSAGANYEWPWCF

SEQ ID NO: 1806 - protein, 14 aa, synthetic construct
TCAAGAHYEWPMCY

SEQ ID NO: 1807 - protein, 14 aa, synthetic construct
SCSAVFSYAWPTCL

SEQ ID NO: 1808 - protein, 14 aa, synthetic construct
TCAAGATWPWPSCL

SEQ ID NO: 1809 - protein, 14 aa, synthetic construct
TCAAGAHWIWPWCE

SEQ ID NO: 1810 - protein, 14 aa, synthetic construct
TCAAGAGWQWPMCF

SEQ ID NO: 1811 - protein, 14 aa, synthetic construct
SCAAGATYEWPRCL

SEQ ID NO: 1812 - protein, 14 aa, synthetic construct
GCAAGANYPWPLCL

SEQ ID NO: 1813 - protein, 14 aa, synthetic construct
TCAAGAYYAWPMCL

SEQ ID NO: 1814 - protein, 14 aa, synthetic construct
SCAAGAPYPWPECL

SEQ ID NO: 1815 - protein, 14 aa, synthetic construct
TCSAGAAYAWPYCL

SEQ ID NO: 1816 - protein, 14 aa, synthetic construct
LCAAGAAYPWPMCL

SEQ ID NO: 1817 - protein, 14 aa, synthetic construct
SCAAGATYEWPICL

SEQ ID NO: 1818 - protein, 14 aa, synthetic construct
SCAAGAMWPWPVCV

SEQ ID NO: 1819 - protein, 14 aa, synthetic construct
SCAAGAQYGWPMCL

SEQ ID NO: 1820 - protein, 14 aa, synthetic construct
WCAAGASYPWPWCL

SEQ ID NO: 1821 - protein, 14 aa, synthetic construct
TCTAVFPYEWPRCL

SEQ ID NO: 1822 - protein, 14 aa, synthetic construct
SCAAGATFHWPMCF

SEQ ID NO: 1823 - protein, 14 aa, synthetic construct
TCSAGFSYKWPWCL

SEQ ID NO: 1824 - protein, 14 aa, synthetic construct
TCAAGAMWTWPECL

SEQ ID NO: 1825 - protein, 14 aa, synthetic construct
TCAAGATYPWPECM

SEQ ID NO: 1826 - protein, 14 aa, synthetic construct
LCAAGFNYPWPLCL

SEQ ID NO: 1827 - protein, 14 aa, synthetic construct
MCTAGATYPWPACL

SEQ ID NO: 1828 - protein, 14 aa, synthetic construct
SCSAGAAWPWPWCL

SEQ ID NO: 1829 - protein, 14 aa, synthetic construct
LCAEGFDYSWPMCL

SEQ ID NO: 1830 - protein, 14 aa, synthetic construct
TCSAGATYSWPFCF

SEQ ID NO: 1831 - protein, 14 aa, synthetic construct
SCKAGAPYYWPGCF

SEQ ID NO: 1832 - protein, 14 aa, synthetic construct
TCSAVFSYTWSNCF

SEQ ID NO: 1833 - protein, 14 aa, synthetic construct
QCAAGAMWTWPACF

SEQ ID NO: 1834 - protein, 14 aa, synthetic construct
TCAAGAAWEWPICF

SEQ ID NO: 1835 - protein, 14 aa, synthetic construct
TCAAGAMWNWPQCY

SEQ ID NO: 1836 - protein, 14 aa, synthetic construct
SCSAGAMYPWPMCL

SEQ ID NO: 1837 - protein, 14 aa, synthetic construct
TCAAGASWEWPLCF

SEQ ID NO: 1838 - protein, 14 aa, synthetic construct
TCSAGATYVWPDCF

SEQ ID NO: 1839 - protein, 14 aa, synthetic construct
TCEAVFIYSWPFCL

SEQ ID NO: 1840 - protein, 14 aa, synthetic construct
LCSAGAMWQWPTCL

SEQ ID NO: 1841 - protein, 14 aa, synthetic construct
LCAEGADYPWPMCL

SEQ ID NO: 1842 - protein, 14 aa, synthetic construct
TCAAGATWDWPLCF

SEQ ID NO: 1843 - protein, 14 aa, synthetic construct
SCAAGAHYKWPVCI

SEQ ID NO: 1844 - protein, 14 aa, synthetic construct
ICAAGFIWSWPACF

SEQ ID NO: 1845 - protein, 14 aa, synthetic construct
TCAAGATYSWPDCF

SEQ ID NO: 1846 - protein, 14 aa, synthetic construct
QCAAGAMWTWPVCF

SEQ ID NO: 1847 - protein, 14 aa, synthetic construct
TCAAGAHYLWPHCL

SEQ ID NO: 1848 - protein, 14 aa, synthetic construct
PCAAGAMWAWPYCL

SEQ ID NO: 1849 - protein, 14 aa, synthetic construct
NCSAGATWPWPMCF

SEQ ID NO: 1850 - protein, 14 aa, synthetic construct
TCAAGVHFGWPLCF

SEQ ID NO: 1851 - protein, 14 aa, synthetic construct
TCAAGATYTWPTCF

SEQ ID NO: 1852 - protein, 14 aa, synthetic construct
TCAAGASWEWPACL

SEQ ID NO: 1853 - protein, 14 aa, synthetic construct
TCAAGAMYQWPECF

SEQ ID NO: 1854 - protein, 14 aa, synthetic construct
TCAAGAHYTWPTCL

SEQ ID NO: 1855 - protein, 14 aa, synthetic construct
TCSAGATYKWPVCL

SEQ ID NO: 1856 - protein, 14 aa, synthetic construct
SCSAGATYEWPYCF

SEQ ID NO: 1857 - protein, 14 aa, synthetic construct
TCAAGANWHWPWCF

SEQ ID NO: 1858 - protein, 14 aa, synthetic construct
LCAAGATYPWPICL

SEQ ID NO: 1859 - protein, 14 aa, synthetic construct
SCSAGALWKWPVCF

SEQ ID NO: 1860 - protein, 14 aa, synthetic construct
TCSAGFSYKWPWCW

SEQ ID NO: 1861 - protein, 14 aa, synthetic construct
SCSAGAMYQWPLCF

SEQ ID NO: 1862 - protein, 14 aa, synthetic construct
QCAAGAMWTWPACF

SEQ ID NO: 1863 - protein, 14 aa, synthetic construct
TCSAGATYMWPACF

SEQ ID NO: 1864 - protein, 14 aa, synthetic construct
TCSAGATYAWPACF

SEQ ID NO: 1865 - protein, 14 aa, synthetic construct
WCGVGMDWRWPECL

SEQ ID NO: 1866 - protein, 14 aa, synthetic construct
TCEDGFHFSWPECF

SEQ ID NO: 1867 - protein, 14 aa, synthetic construct
QCAAGAMWTWPACF

SEQ ID NO: 1868 - protein, 14 aa, synthetic construct
TCSAGATYTWPSCF

SEQ ID NO: 1869 - protein, 14 aa, synthetic construct
WCDQFFHYKWPLCL

SEQ ID NO: 1870 - protein, 14 aa, synthetic construct
SCAAGATYVWPMCF

SEQ ID NO: 1871 - protein, 14 aa, synthetic construct
TCAAGAHYSWPFCM

SEQ ID NO: 1872 - protein, 14 aa, synthetic construct
SCSAGASLQLSQCF

SEQ ID NO: 1873 - protein, 14 aa, synthetic construct
RCSFRFITLAEACV

SEQ ID NO: 1874 - protein, 14 aa, synthetic construct
TCSAGAHYPWPICL

SEQ ID NO: 1875 - protein, 14 aa, synthetic construct
TCAAGAQFAWPLCL

SEQ ID NO: 1876 - protein, 14 aa, synthetic construct
LCSAGFLFQWSTCL

SEQ ID NO: 1877 - protein, 14 aa, synthetic construct
RCAAGFHYSWPNCF

SEQ ID NO: 1878 - protein, 14 aa, synthetic construct
GCAAGASYPWPACL

SEQ ID NO: 1879 - protein, 14 aa, synthetic construct
PCAAGAMWPWPVCL

SEQ ID NO: 1880 - protein, 14 aa, synthetic construct
TCSAGATYSWPACL

SEQ ID NO: 1881 - protein, 14 aa, synthetic construct
TCAAGASWNWPACE

SEQ ID NO: 1882 - protein, 14 aa, synthetic construct
LCAAGAHYSWPACF

SEQ ID NO: 1883 - protein, 14 aa, synthetic construct
PCSAGVTYAWLYCV

SEQ ID NO: 1884 - protein, 14 aa, synthetic construct
MCAAGAAWAWPLCL

SEQ ID NO: 1885 - protein, 14 aa, synthetic construct
TCAAGASYPWPLCV

SEQ ID NO: 1886 - protein, 14 aa, synthetic construct
LCAAGFMYEWPLCF

SEQ ID NO: 1887 - protein, 14 aa, synthetic construct
TCSAGAEYTWPLCF

SEQ ID NO: 1888 - protein, 14 aa, synthetic construct
SCAAGAAWGWPACF

SEQ ID NO: 1889 - protein, 14 aa, synthetic construct
TCAAGATWLWPVCL

SEQ ID NO: 1890 - protein, 14 aa, synthetic construct
SCSAFFHFHWPACL

SEQ ID NO: 1891 - protein, 14 aa, synthetic construct
TCSAGANWVWPLCL

SEQ ID NO: 1892 - protein, 14 aa, synthetic construct
TCSAGAHWVWPYCL

SEQ ID NO: 1893 - protein, 14 aa, synthetic construct
SCAAGATYGWPECF

SEQ ID NO: 1894 - protein, 14 aa, synthetic construct
SCAAGATWAWPACL

SEQ ID NO: 1895 - protein, 14 aa, synthetic construct
LCSAGAMWEWPLCL

SEQ ID NO: 1896 - protein, 14 aa, synthetic construct
TCSAGAGYPWPTCL

SEQ ID NO: 1897 - protein, 14 aa, synthetic construct
TCSAGAAWTWPLCF

SEQ ID NO: 1898 - protein, 14 aa, synthetic construct
TCSAGAAYEWPECF

SEQ ID NO: 1899 - protein, 14 aa, synthetic construct
TCSAGALWEWPMCF

SEQ ID NO: 1900 - protein, 14 aa, synthetic construct
PCAAGAHYTWPTCL

SEQ ID NO: 1901 - protein, 14 aa, synthetic construct
SCSAGATYTWPACL

SEQ ID NO: 1902 - protein, 14 aa, synthetic construct
TCSAGAHYSWPKCF

SEQ ID NO: 1903 - protein, 14 aa, synthetic construct
SCAAGAHYPWPECL

SEQ ID NO: 1904 - protein, 14 aa, synthetic construct
SCAEVFNYVWPFCF

SEQ ID NO: 1905 - protein, 14 aa, synthetic construct
TCAAGAAYTWPVCF

SEQ ID NO: 1906 - protein, 14 aa, synthetic construct
SCAAGAMWEWPKCF

SEQ ID NO: 1907 - protein, 14 aa, synthetic construct
SCADGAIWEWPWCF

SEQ ID NO: 1908 - protein, 14 aa, synthetic construct
TCAAGATYEWPSCL

SEQ ID NO: 1909 - protein, 14 aa, synthetic construct
SCSAGAMYTWPTCL

SEQ ID NO: 1910 - protein, 14 aa, synthetic construct
LCAAGAAWEWPMCF

SEQ ID NO: 1911 - protein, 14 aa, synthetic construct
QCSAGATYAWPFCL

SEQ ID NO: 1912 - protein, 14 aa, synthetic construct
TCAAGVPYKWPPCL

SEQ ID NO: 1913 - protein, 14 aa, synthetic construct
SCAAGATYTWPFCL

SEQ ID NO: 1914 - protein, 14 aa, synthetic construct
RCAAVFSYTWPPCL

SEQ ID NO: 1915 - protein, 14 aa, synthetic construct
TCSAGATYKWPACF

SEQ ID NO: 1916 - protein, 14 aa, synthetic construct
LCAAGAYYPWPLCF

SEQ ID NO: 1917 - protein, 14 aa, synthetic construct
TCTAGFSYKWPTCL

SEQ ID NO: 1918 - protein, 14 aa, synthetic construct
NCSAGATWPWPMCF

SEQ ID NO: 1919 - protein, 14 aa, synthetic construct
SCSAGATYQWPYCF

SEQ ID NO: 1920 - protein, 14 aa, synthetic construct
SCAAGATYSWPACL

SEQ ID NO: 1921 - protein, 14 aa, synthetic construct
NCAAGAMYSWPTCL

SEQ ID NO: 1922 - protein, 14 aa, synthetic construct
RCAAGAMWTWPACF

SEQ ID NO: 1923 - protein, 14 aa, synthetic construct
TCAAGATYMWPVCL

SEQ ID NO: 1924 - protein, 14 aa, synthetic construct
SCAAGATWKWPECL

SEQ ID NO: 1925 - protein, 14 aa, synthetic construct
TCAAGATWLWPWCL

SEQ ID NO: 1926 - protein, 14 aa, synthetic construct
TCAAGAVWTWPICF

SEQ ID NO: 1927 - protein, 14 aa, synthetic construct
TCADGAFWQWPVCL

SEQ ID NO: 1928 - protein, 14 aa, synthetic construct
TCSAGASWGWPWCL

SEQ ID NO: 1929 - protein, 14 aa, synthetic construct
TCSAGATYSWPYCL

SEQ ID NO: 1930 - protein, 14 aa, synthetic construct
TCSAGATYSWPSCF

SEQ ID NO: 1931 - protein, 14 aa, synthetic construct
LCAAGATYPWPDCV

SEQ ID NO: 1932 - protein, 14 aa, synthetic construct
TCAAGANWPWPECL

SEQ ID NO: 1933 - protein, 14 aa, synthetic construct
LCEEFFHYSWPLCL

SEQ ID NO: 1934 - protein, 14 aa, synthetic construct
PCSDGVAYPWPYCV

SEQ ID NO: 1935 - protein, 14 aa, synthetic construct
SCAAGAHWSWPVCF

SEQ ID NO: 1936 - protein, 14 aa, synthetic construct
LCSAGAMYPWPVCL

SEQ ID NO: 1937 - protein, 14 aa, synthetic construct
SCSAGATWAWPQCF

SEQ ID NO: 1938 - protein, 14 aa, synthetic construct
SCSAVFSYRWPKCL

SEQ ID NO: 1939 - protein, 14 aa, synthetic construct
SCSAGAGWAWPMCF

SEQ ID NO: 1940 - protein, 14 aa, synthetic construct
SCAAGFDYGWPMCL

SEQ ID NO: 1941 - protein, 14 aa, synthetic construct
SCADGFNYVWPLCF

SEQ ID NO: 1942 - protein, 14 aa, synthetic construct
TCAAGANYSWPACL

SEQ ID NO: 1943 - protein, 14 aa, synthetic construct
QCAAGATYPWPVCL

SEQ ID NO: 1944 - protein, 14 aa, synthetic construct
TCSAGATYTWPVCF

SEQ ID NO: 1945 - protein, 14 aa, synthetic construct
TCSAGAHYEWPKCL

SEQ ID NO: 1946 - protein, 14 aa, synthetic construct
TCSAGATYSWPLCF

SEQ ID NO: 1947 - protein, 14 aa, synthetic construct
TCAAGATYSWPSCF

SEQ ID NO: 1948 - protein, 14 aa, synthetic construct
TCAAGANYAWPVCL

SEQ ID NO: 1949 - protein, 14 aa, synthetic construct
TCAAGAHYEWPQCF

SEQ ID NO: 1950 - protein, 14 aa, synthetic construct
TCAAGATYNWPWCF

SEQ ID NO: 1951 - protein, 14 aa, synthetic construct
TCAAGATWTWPTCM

SEQ ID NO: 1952 - protein, 14 aa, synthetic construct
PCAAGAQWSWPMCL

SEQ ID NO: 1953 - protein, 14 aa, synthetic construct
SCAAGSTWAWPACL

SEQ ID NO: 1954 - protein, 14 aa, synthetic construct
SCAAGFHYEWPQCF

SEQ ID NO: 1955 - protein, 14 aa, synthetic construct
SCTAGFRIHWPMCF

SEQ ID NO: 1956 - protein, 14 aa, synthetic construct
SCAAGAAYAWPWCL

SEQ ID NO: 1957 - protein, 14 aa, synthetic construct
MCTAGFSFNWPECL

SEQ ID NO: 1958 - protein, 14 aa, synthetic construct
LCDQFFHYNWPACL

SEQ ID NO: 1959 - protein, 14 aa, synthetic construct
SCAAVFSFNWPECF

SEQ ID NO: 1960 - protein, 14 aa, synthetic construct
TCSAGASYSWPYCM

SEQ ID NO: 1961 - protein, 14 aa, synthetic construct
WCSEVFSYPWPACL

SEQ ID NO: 1962 - protein, 14 aa, synthetic construct
SCTAVFSYALSPCF

SEQ ID NO: 1963 - protein, 14 aa, synthetic construct
LCAAVFAYTWPMCF

SEQ ID NO: 1964 - protein, 14 aa, synthetic construct
PCAAGAHYVWPVCF

SEQ ID NO: 1965 - protein, 14 aa, synthetic construct
TCSAGATYKWPTCL

SEQ ID NO: 1966 - protein, 14 aa, synthetic construct
SCAAGAHWSWPACL

SEQ ID NO: 1967 - protein, 14 aa, synthetic construct
MCAAGAMYNWPLCL

SEQ ID NO: 1968 - protein, 14 aa, synthetic construct
SCAAGASYSWPLCF

SEQ ID NO: 1969 - protein, 14 aa, synthetic construct
VCAAGAAYPWPACL

SEQ ID NO: 1970 - protein, 14 aa, synthetic construct
TCSAGAHYPWPMCL

SEQ ID NO: 1971 - protein, 14 aa, synthetic construct
TCAAGATWVWPTCF

SEQ ID NO: 1972 - protein, 14 aa, synthetic construct
TCSAGAMYNWPECF

SEQ ID NO: 1973 - protein, 14 aa, synthetic construct
TCSAGAMYSWPLCI

SEQ ID NO: 1974 - protein, 14 aa, synthetic construct
QCAAGFSYTWPECY

SEQ ID NO: 1975 - protein, 14 aa, synthetic construct
WCAAFFHYPWPQCF

SEQ ID NO: 1976 - protein, 14 aa, synthetic construct
RCKAGVPYKWPMCL

SEQ ID NO: 1977 - protein, 14 aa, synthetic construct
TCAAGATYEWPSCI

SEQ ID NO: 1978 - protein, 14 aa, synthetic construct
TCAAGAKYVWPLCF

SEQ ID NO: 1979 - protein, 14 aa, synthetic construct
LCEAGFNYDWPRCL

SEQ ID NO: 1980 - protein, 14 aa, synthetic construct
TCAAGASWDWPFCF

SEQ ID NO: 1981 - protein, 14 aa, synthetic construct
ECGWEPGQHWRVCF

SEQ ID NO: 1982 - protein, 14 aa, synthetic construct
SCAAGATYEWPTCL

SEQ ID NO: 1983 - protein, 14 aa, synthetic construct
SCAAGATYKWPACF

SEQ ID NO: 1984 - protein, 14 aa, synthetic construct
SCSAGAMWLWPECF

SEQ ID NO: 1985 - protein, 14 aa, synthetic construct
WCSAVFSYQWPPCF

SEQ ID NO: 1986 - protein, 14 aa, synthetic construct
TCSAGATYKWPMCF

SEQ ID NO: 1987 - protein, 14 aa, synthetic construct
TCSAGATYGWPACF

SEQ ID NO: 1988 - protein, 14 aa, synthetic construct
ICAAGAGWPWPWCL

SEQ ID NO: 1989 - protein, 14 aa, synthetic construct
ECSAGAMWGWPACF

SEQ ID NO: 1990 - protein, 14 aa, synthetic construct
TCAAGATYDWPSCL

SEQ ID NO: 1991 - protein, 14 aa, synthetic construct
TCAAGAVWQWPTCF

SEQ ID NO: 1992 - protein, 14 aa, synthetic construct
PCSAGATYAWPYCL

SEQ ID NO: 1993 - protein, 14 aa, synthetic construct
TCAAGAQLEWPWCF

SEQ ID NO: 1994 - protein, 14 aa, synthetic construct
GCAAGAEYNWPTCL

SEQ ID NO: 1995 - protein, 14 aa, synthetic construct
TCAAGAAYTWPHCF

SEQ ID NO: 1996 - protein, 14 aa, synthetic construct
TCSAGAQWEWPACL

SEQ ID NO: 1997 - protein, 14 aa, synthetic construct
WCSAVFSYQWPVCL

SEQ ID NO: 1998 - protein, 14 aa, synthetic construct
SCSAGASYAWPMCI

SEQ ID NO: 1999 - protein, 14 aa, synthetic construct
DCWWDSPYHWRVCL

SEQ ID NO: 2000 - protein, 14 aa, synthetic construct
SCAAGAGYGWPQCL

SEQ ID NO: 2001 - protein, 14 aa, synthetic construct
SCGGGFHYSWPLCF

SEQ ID NO: 2002 - protein, 14 aa, synthetic construct
GCAAGFHYTLSTCL

SEQ ID NO: 2003 - protein, 14 aa, synthetic construct
DCFYAADIHWNYCN

SEQ ID NO: 2004 - protein, 14 aa, synthetic construct
YECHQGLFHRWCVN

SEQ ID NO: 2005 - protein, 14 aa, synthetic construct
SCFSFARLEVVPCD

SEQ ID NO: 2006 - protein, 14 aa, synthetic construct
TCLRFADLAIIHCD

SEQ ID NO: 2007 - protein, 14 aa, synthetic construct
NCWWHDFRAGHVVC

SEQ ID NO: 2008 - protein, 14 aa, synthetic construct
IRCVGEGHDLVCIF

SEQ ID NO: 2009 - protein, 14 aa, synthetic construct
SIPCIPRDWLCPIK

SEQ ID NO: 2010 - protein, 14 aa, synthetic construct
ICQWIGATNAWVCY

SEQ ID NO: 2011 - protein, 14 aa, synthetic construct
HLFCWEGSDRCAWV

SEQ ID NO: 2012 - protein, 14 aa, synthetic construct
PLCGTEEVWWECRL

SEQ ID NO: 2013 - protein, 14 aa, synthetic construct
NAHCWLWVPAHCRV

SEQ ID NO: 2014 - protein, 14 aa, synthetic construct
FGHCAGSPVFCAYW

SEQ ID NO: 2015 - protein, 14 aa, synthetic construct
NCFFAADIHWNFCT

SEQ ID NO: 2016 - protein, 14 aa, synthetic construct
FCQWIEATNAWLCY

SEQ ID NO: 2017 - protein, 14 aa, synthetic construct
FCGWMDGDVFWFCG

SEQ ID NO: 2018 - protein, 14 aa, synthetic construct
FCNWVDGDVWVVCK

SEQ ID NO: 2019 - protein, 14 aa, synthetic construct
EGCLTLVDGRAWCW

SEQ ID NO: 2020 - protein, 14 aa, synthetic construct
MEYCSFHRFTCVLW

SEQ ID NO: 2021 - protein, 14 aa, synthetic construct
HCKFHDYHSWYMCY

SEQ ID NO: 2022 - protein, 14 aa, synthetic construct
ACHSLVLKHHLQKC

SEQ ID NO: 2023 - protein, 14 aa, synthetic construct
SCGWLRGEEFGWWC

SEQ ID NO: 2024 - protein, 14 aa, synthetic construct
PDCVYHSFWGYSCR

SEQ ID NO: 2025 - protein, 14 aa, synthetic construct
LMKWCTPRWMCAAE

SEQ ID NO: 2026 - protein, 14 aa, synthetic construct
IAVLCQPNWMCAGF

SEQ ID NO: 2027 - protein, 14 aa, synthetic construct
PELRCVPFWMCSFN

SEQ ID NO: 2028 - protein, 14 aa, synthetic construct
SIPCIPRDWLCPIK

SEQ ID NO: 2029 - protein, 14 aa, synthetic construct
MEYCSFHRFTCVLW

SEQ ID NO: 2030 - protein, 14 aa, synthetic construct
IRCVGEGHDLVCIF

SEQ ID NO: 2031 - protein, 14 aa, synthetic construct
YECHQGLFHRWCVN

SEQ ID NO: 2032 - protein, 14 aa, synthetic construct
FVCWTFGEHIKVCR

SEQ ID NO: 2033 - protein, 14 aa, synthetic construct
ILCGLYEALVSECG

SEQ ID NO: 2034 - protein, 14 aa, synthetic construct
IECAYMTDQRFWCW

SEQ ID NO: 2035 - protein, 14 aa, synthetic construct
HCLGPALGPVDGDC

SEQ ID NO: 2036 - protein, 14 aa, synthetic construct
SCGWLRGEEFGWWC

SEQ ID NO: 2037 - protein, 14 aa, synthetic construct
FVPCIPSHWLCPIW

SEQ ID NO: 2038 - protein, 14 aa, synthetic construct
HCLWHESSGRVLCF

SEQ ID NO: 2039 - protein, 14 aa, synthetic construct
MEYCSFHRFTCVLW

SEQ ID NO: 2040 - protein, 14 aa, synthetic construct
SKLLCVPPWMCYHV

SEQ ID NO: 2041 - protein, 14 aa, synthetic construct
QLPCHYWGEWCPQA

SEQ ID NO: 2042 - protein, 14 aa, synthetic construct
FWECYSSFCRFVEG

SEQ ID NO: 2043 - protein, 14 aa, synthetic construct
PLCGTEEVWWECRL

SEQ ID NO: 2044 - protein, 14 aa, synthetic construct
LTRCVPDWMCYRAV

SEQ ID NO: 2045 - protein, 14 aa, synthetic construct
YCWVDADMWLIFRC

SEQ ID NO: 2046 - protein, 14 aa, synthetic construct
ILPCHWYTSDCPQH

SEQ ID NO: 2047 - protein, 14 aa, synthetic construct
WCWVQDDRRHVVCG

SEQ ID NO: 2048 - protein, 14 aa, synthetic construct
MCQWDELNYWMDCD

SEQ ID NO: 2049 - protein, 14 aa, synthetic construct
QCVWDNFNYWMDCD

SEQ ID NO: 2050 - protein, 14 aa, synthetic construct
QCTWNEKTWWMECE

SEQ ID NO: 2051 - protein, 14 aa, synthetic construct
MCQWDKINYWMDCD

SEQ ID NO: 2052 - protein, 14 aa, synthetic construct
QCVWDLTNYWMNCD

SEQ ID NO: 2053 - protein, 14 aa, synthetic construct
DCHWNKATWWMDCE

SEQ ID NO: 2054 - protein, 14 aa, synthetic construct
MCFVTGWGVPDDCN

SEQ ID NO: 2055 - protein, 14 aa, synthetic construct
QCVWDRGTWWMACD

SEQ ID NO: 2056 - protein, 14 aa, synthetic construct
LCQWYPKFHWMDCD

SEQ ID NO: 2057 - protein, 14 aa, synthetic construct
HCEFHDYQSCDVLY

SEQ ID NO: 2058 - protein, 14 aa, synthetic construct
HCKFHDYHSWYVCY

SEQ ID NO: 2059 - protein, 14 aa, synthetic construct
LCEWWTSHVDAWCA

SEQ ID NO: 2060 - protein, 14 aa, synthetic construct
WEKLCTPAWMCVGF

SEQ ID NO: 2061 - protein, 14 aa, synthetic construct
LEKLCIPAWMCEWL

SEQ ID NO: 2062 - protein, 14 aa, synthetic construct
VLKWCRPAWMCEVL

SEQ ID NO: 2063 - protein, 14 aa, synthetic construct
VGKLCVPEWMCVGL

SEQ ID NO: 2064 - protein, 14 aa, synthetic construct
FVPLCKPAWMCSFV

SEQ ID NO: 2065 - protein, 14 aa, synthetic construct
HVKLCKPAWMCQGL

SEQ ID NO: 2066 - protein, 14 aa, synthetic construct
FEKLCVPKWMCEGI

SEQ ID NO: 2067 - protein, 14 aa, synthetic construct
IDKLCIPFWMCENL

SEQ ID NO: 2068 - protein, 14 aa, synthetic construct
FEKWCTPPWMCSLF

SEQ ID NO: 2069 - protein, 14 aa, synthetic construct
DLRLCKPAWMCYFI

SEQ ID NO: 2070 - protein, 14 aa, synthetic construct
EGIRCTPIWMCEGF

SEQ ID NO: 2071 - protein, 14 aa, synthetic construct
IPKSCIPSWMCTGF

SEQ ID NO: 2072 - protein, 14 aa, synthetic construct
LTKLCIPDWMCSEF

SEQ ID NO: 2073 - protein, 14 aa, synthetic construct
LDNWCKPSWMCTGF

SEQ ID NO: 2074 - protein, 14 aa, synthetic construct
EFKWCIPSWMCHET

SEQ ID NO: 2075 - protein, 14 aa, synthetic construct
VVKACIPTWMCQFV

SEQ ID NO: 2076 - protein, 14 aa, synthetic construct
VTKWCIPPWMCEVT

SEQ ID NO: 2077 - protein, 14 aa, synthetic construct
DLRLCKPAWMCDFI

SEQ ID NO: 2078 - protein, 14 aa, synthetic construct
LDKWCVPKWMCSGL

SEQ ID NO: 2079 - protein, 14 aa, synthetic construct
GEKWCIPDWMCSGF

SEQ ID NO: 2080 - protein, 14 aa, synthetic construct
LEKTCIPTWMCVGF

SEQ ID NO: 2081 - protein, 14 aa, synthetic construct
VEKLCTPIWMCLGF

SEQ ID NO: 2082 - protein, 14 aa, synthetic construct
DVKLCKPEWMCYGL

SEQ ID NO: 2083 - protein, 14 aa, synthetic construct
ISKWCIPEWMCTSP

SEQ ID NO: 2084 - protein, 14 aa, synthetic construct
LEKLCKPAWMCVNF

SEQ ID NO: 2085 - protein, 14 aa, synthetic construct
IDIRCTPIWMCVGF

SEQ ID NO: 2086 - protein, 14 aa, synthetic construct
EPKWCVPRGLCNYD

SEQ ID NO: 2087 - protein, 14 aa, synthetic construct
AMKWCTPRWMCAAE

SEQ ID NO: 2088 - protein, 14 aa, synthetic construct
LAKWCTPRWMCAAE

SEQ ID NO: 2089 - protein, 14 aa, synthetic construct
LMAWCTPRWMCAAE

SEQ ID NO: 2090 - protein, 14 aa, synthetic construct
LMKACTPRWMCAAE

SEQ ID NO: 2091 - protein, 14 aa, synthetic construct
LMKWCAPRWMCAAE

SEQ ID NO: 2092 - protein, 14 aa, synthetic construct
LMKWCTARWMCAAE

SEQ ID NO: 2093 - protein, 14 aa, synthetic construct
LMKWCTPAWMCAAE

SEQ ID NO: 2094 - protein, 14 aa, synthetic construct
LMKWCTPRAMCAAE

SEQ ID NO: 2095 - protein, 14 aa, synthetic construct
LMKWCTPRWACAAE

SEQ ID NO: 2096 - protein, 14 aa, synthetic construct
LMKWCTPRWMCAAA

SEQ ID NO: 2097 - protein, 14 aa, synthetic construct
AAVLCQPNWMCAGF

SEQ ID NO: 2098 - protein, 14 aa, synthetic construct
IAALCQPNWMCAGF

SEQ ID NO: 2099 - protein, 14 aa, synthetic construct
IAVACQPNWMCAGF

SEQ ID NO: 2100 - protein, 14 aa, synthetic construct
IAVLCAPNWMCAGF

SEQ ID NO: 2101 - protein, 14 aa, synthetic construct
IAVLCQANWMCAGF

SEQ ID NO: 2102 - protein, 14 aa, synthetic construct
IAVLCQPAWMCAGF

SEQ ID NO: 2103 - protein, 14 aa, synthetic construct
IAVLCQPNAMCAGF

SEQ ID NO: 2104 - protein, 14 aa, synthetic construct
IAVLCQPNWACAGF

SEQ ID NO: 2105 - protein, 14 aa, synthetic construct
IAVLCQPNWMCAAF

SEQ ID NO: 2106 - protein, 14 aa, synthetic construct
IAVLCQPNWMCAGA

SEQ ID NO: 2107 - protein, 14 aa, synthetic construct
YFVQCRPAWMCEGF

SEQ ID NO: 2108 - protein, 14 aa, synthetic construct
IVPLCKPAWMCKLF

SEQ ID NO: 2109 - protein, 14 aa, synthetic construct
AVKACIPEWMCIGF

SEQ ID NO: 2110 - protein, 14 aa, synthetic construct
VQIQCRPAWMCLGF

SEQ ID NO: 2111 - protein, 14 aa, synthetic construct
AEVKCIPQWMCQGF

SEQ ID NO: 2112 - protein, 14 aa, synthetic construct
TAHHCKPAWMCTGF

SEQ ID NO: 2113 - protein, 14 aa, synthetic construct
FTNYCVPSWMCTGF

SEQ ID NO: 2114 - protein, 14 aa, synthetic construct
VEKVCKPVWMCVGF

SEQ ID NO: 2115 - protein, 14 aa, synthetic construct
EEPLCRPVWMCEGF

SEQ ID NO: 2116 - protein, 14 aa, synthetic construct
ESRLCVPAWMCAGF

SEQ ID NO: 2117 - protein, 14 aa, synthetic construct
EDILCKPKWMCEGF

SEQ ID NO: 2118 - protein, 14 aa, synthetic construct
LHVYCVPEWMCAGF

SEQ ID NO: 2119 - protein, 14 aa, synthetic construct
LEPLCVPRWMCVGF

SEQ ID NO: 2120 - protein, 14 aa, synthetic construct
ITPVCKPLWMCSGL

SEQ ID NO: 2121 - protein, 14 aa, synthetic construct
VEVKCFPLWFCVGL

SEQ ID NO: 2122 - protein, 14 aa, synthetic construct
ITPICKPAWICSGF

SEQ ID NO: 2123 - protein, 14 aa, synthetic construct
VVIKCKPEWMCSGF

SEQ ID NO: 2124 - protein, 14 aa, synthetic construct
PEHLCLPRWMCEGF

SEQ ID NO: 2125 - protein, 14 aa, synthetic construct
YERACIPNWICEGF

SEQ ID NO: 2126 - protein, 14 aa, synthetic construct
TTHVCIPSWMCSGF

SEQ ID NO: 2127 - protein, 14 aa, synthetic construct
VNHWCVPTWMCAGF

SEQ ID NO: 2128 - protein, 14 aa, synthetic construct
IVVKCVPSWMCEGF

SEQ ID NO: 2129 - protein, 14 aa, synthetic construct
TVAYCKPAWMCQGF

SEQ ID NO: 2130 - protein, 14 aa, synthetic construct
TEVRCTPPWMCLGF

SEQ ID NO: 2131 - protein, 14 aa, synthetic construct
VERLCTPAWMCHGF

SEQ ID NO: 2132 - protein, 14 aa, synthetic construct
VLKYCIPDWMCAGI

SEQ ID NO: 2133 - protein, 14 aa, synthetic construct
PERLCTPPWMCLGF

SEQ ID NO: 2134 - protein, 14 aa, synthetic construct
MERWCVPDWMCATF

SEQ ID NO: 2135 - protein, 14 aa, synthetic construct
ALKLCIPFWMCEGL

SEQ ID NO: 2136 - protein, 14 aa, synthetic construct
MVKWCTPAWMCEML

SEQ ID NO: 2137 - protein, 14 aa, synthetic construct
IVKRCEPMWMCAGF

SEQ ID NO: 2138 - protein, 14 aa, synthetic construct
WENWCTPAWMCVGF

SEQ ID NO: 2139 - protein, 14 aa, synthetic construct
TEIRCTPQWMCLGF

SEQ ID NO: 2140 - protein, 14 aa, synthetic construct
VEKMCRPAWMCWVM

SEQ ID NO: 2141 - protein, 14 aa, synthetic construct
ISKLCTPPWMCEML

SEQ ID NO: 2142 - protein, 14 aa, synthetic construct
WENWCQPAWMCTGL

SEQ ID NO: 2143 - protein, 14 aa, synthetic construct
VLKLCVPPWMCMAQ

SEQ ID NO: 2144 - protein, 14 aa, synthetic construct
MDNWCTPEWMCLGF

SEQ ID NO: 2145 - protein, 14 aa, synthetic construct
MDKWCTPPWMCDWL

SEQ ID NO: 2146 - protein, 14 aa, synthetic construct
EPKWCTPAWMCEWM

SEQ ID NO: 2147 - protein, 14 aa, synthetic construct
IIPWCKPAWMCSGM

SEQ ID NO: 2148 - protein, 14 aa, synthetic construct
MGKWCIPEWMCNVS

SEQ ID NO: 2149 - protein, 14 aa, synthetic construct
DIPWCIPPWMCAGS

SEQ ID NO: 2150 - protein, 14 aa, synthetic construct
VERMCMPAWMCDMF

SEQ ID NO: 2151 - protein, 14 aa, synthetic construct
YEKWCVPDWMCSMI

SEQ ID NO: 2152 - protein, 14 aa, synthetic construct
WLPMCRPAWMCAGL

SEQ ID NO: 2153 - protein, 14 aa, synthetic construct
GLNWCTPTWMCQGF

SEQ ID NO: 2154 - protein, 14 aa, synthetic construct
VMKWCIPVWMCGGM

SEQ ID NO: 2155 - protein, 14 aa, synthetic construct
YDILCRPSWMCSWV

SEQ ID NO: 2156 - protein, 14 aa, synthetic construct
MVKWCIPSWMCDSV

SEQ ID NO: 2157 - protein, 14 aa, synthetic construct
TDKWCIPPWMCMLQ

SEQ ID NO: 2158 - protein, 14 aa, synthetic construct
VERWCVPEWMCHWI

SEQ ID NO: 2159 - protein, 14 aa, synthetic construct
LDRWCIPEWMCEMF

SEQ ID NO: 2160 - protein, 14 aa, synthetic construct
TDKLCIPEWMCINW

SEQ ID NO: 2161 - protein, 14 aa, synthetic construct
FTNWCTPEWMCSGF

SEQ ID NO: 2162 - protein, 14 aa, synthetic construct
PSMRCIPEWMCAML

SEQ ID NO: 2163 - protein, 14 aa, synthetic construct
SMHWCTPKWMCEGL

SEQ ID NO: 2164 - protein, 14 aa, synthetic construct
AIPWCIPAWMCQVF

SEQ ID NO: 2165 - protein, 14 aa, synthetic construct
FSHWCIPEWMCSTS

SEQ ID NO: 2166 - protein, 14 aa, synthetic construct
PTKLCIPEWMCYVR

SEQ ID NO: 2167 - protein, 14 aa, synthetic construct
SEMLCKPSWMCLGF

SEQ ID NO: 2168 - protein, 14 aa, synthetic construct
WDHWCTPAWMCEFV

SEQ ID NO: 2169 - protein, 14 aa, synthetic construct
MEKWCIPEWMCLHT

SEQ ID NO: 2170 - protein, 14 aa, synthetic construct
WEKWCTPQWMCELI

SEQ ID NO: 2171 - protein, 14 aa, synthetic construct
MEKWCTPSWMCVGF

SEQ ID NO: 2172 - protein, 14 aa, synthetic construct
MGNWCIPTWMCTGF

SEQ ID NO: 2173 - protein, 14 aa, synthetic construct
VMKWCIPSWMCSQD

SEQ ID NO: 2174 - protein, 14 aa, synthetic construct
VDKWCTPIWMCEGF

SEQ ID NO: 2175 - protein, 14 aa, synthetic construct
VEKWCVPTWMCDWV

SEQ ID NO: 2176 - protein, 14 aa, synthetic construct
GDNWCKPEWMCIGF

SEQ ID NO: 2177 - protein, 14 aa, synthetic construct
AVKLCIPEWMCVGQ

SEQ ID NO: 2178 - protein, 14 aa, synthetic construct
LDKWCIPEWMCFDY

SEQ ID NO: 2179 - protein, 14 aa, synthetic construct
DFRWCIPEWMCTGY

SEQ ID NO: 2180 - protein, 14 aa, synthetic construct
IMKWCIPEWMCYFF

SEQ ID NO: 2181 - protein, 14 aa, synthetic construct
EITRCIPAWMCDFW

SEQ ID NO: 2182 - protein, 14 aa, synthetic construct
WEHWCRPAWMCESL

SEQ ID NO: 2183 - protein, 14 aa, synthetic construct
WENRCTPAWMCKGF

SEQ ID NO: 2184 - protein, 14 aa, synthetic construct
MEKLCKPAWMCSML

SEQ ID NO: 2185 - protein, 14 aa, synthetic construct
SIKMCIPQWMCVMQ

SEQ ID NO: 2186 - protein, 14 aa, synthetic construct
EFIWCRPAWMCMDV

SEQ ID NO: 2187 - protein, 14 aa, synthetic construct
HVKWCIPAWMCEAS

SEQ ID NO: 2188 - protein, 14 aa, synthetic construct
VMKWCIPEWMCQHT

SEQ ID NO: 2189 - protein, 14 aa, synthetic construct
VEHWCIPAWMCEWM

SEQ ID NO: 2190 - protein, 14 aa, synthetic construct
SPKWCTPEWMCSHL

SEQ ID NO: 2191 - protein, 14 aa, synthetic construct
FVPWCIPAWMCAEN

SEQ ID NO: 2192 - protein, 14 aa, synthetic construct
VVKLCIPEWMCAEW

SEQ ID NO: 2193 - protein, 14 aa, synthetic construct
IERWCIPDWMCHVW

SEQ ID NO: 2194 - protein, 14 aa, synthetic construct
VEILCKPKWMCEFW

SEQ ID NO: 2195 - protein, 14 aa, synthetic construct
SLHWCIPAWMCDFV

SEQ ID NO: 2196 - protein, 14 aa, synthetic construct
VLMLCKPAWMCMGF

SEQ ID NO: 2197 - protein, 14 aa, synthetic construct
LEKWCTPAWMCEML

SEQ ID NO: 2198 - protein, 14 aa, synthetic construct
VTPWCTPSWMCFGF

SEQ ID NO: 2199 - protein, 14 aa, synthetic construct
VNKLCTPEWMCVGM

SEQ ID NO: 2200 - protein, 14 aa, synthetic construct
MVMRCQPEWMCTGI

SEQ ID NO: 2201 - protein, 14 aa, synthetic construct
FAKWCIPEWMCSVS

SEQ ID NO: 2202 - protein, 14 aa, synthetic construct
WEKWCIPAWMCVAD

SEQ ID NO: 2203 - protein, 14 aa, synthetic construct
LDHWCFPMWMCTGF

SEQ ID NO: 2204 - protein, 14 aa, synthetic construct
WSNWCTPEWMCVGF

SEQ ID NO: 2205 - protein, 14 aa, synthetic construct
DVMWCKPSWMCDWL

SEQ ID NO: 2206 - protein, 14 aa, synthetic construct
AIKWCIPSWMCVED

SEQ ID NO: 2207 - protein, 14 aa, synthetic construct
LEKWCIPAWMCEWS

SEQ ID NO: 2208 - protein, 14 aa, synthetic construct
VPKLCTPVWMCTGF

SEQ ID NO: 2209 - protein, 14 aa, synthetic construct
FDKWCIPPWMCQAL

SEQ ID NO: 2210 - protein, 14 aa, synthetic construct
FEKWCTPAWMCAGW

SEQ ID NO: 2211 - protein, 14 aa, synthetic construct
WEKMCVPSWMCHFS

SEQ ID NO: 2212 - protein, 14 aa, synthetic construct
VLKWCTPAWMCEIF

SEQ ID NO: 2213 - protein, 14 aa, synthetic construct
MEKLCIPAWMCDGM

SEQ ID NO: 2214 - protein, 14 aa, synthetic construct
AEKWCFPAWMCERP

SEQ ID NO: 2215 - protein, 14 aa, synthetic construct
SVKMCTPAWMCSGF

SEQ ID NO: 2216 - protein, 14 aa, synthetic construct
VSRLCIPTWMCDYS

SEQ ID NO: 2217 - protein, 14 aa, synthetic construct
TDMWCTPMWMCMGF

SEQ ID NO: 2218 - protein, 14 aa, synthetic construct
LIPWCIPAWMCTSD

SEQ ID NO: 2219 - protein, 14 aa, synthetic construct
IDMRCTPNWMCIGF

SEQ ID NO: 2220 - protein, 14 aa, synthetic construct
DVKWCIPAWMCEGF

SEQ ID NO: 2221 - protein, 14 aa, synthetic construct
EIRLCTPSWMCMGF

SEQ ID NO: 2222 - protein, 14 aa, synthetic construct
VMKWCIPEWMCYML

SEQ ID NO: 2223 - protein, 14 aa, synthetic construct
SAHMCIPPWMCLHT

SEQ ID NO: 2224 - protein, 14 aa, synthetic construct
WDNWCIPPWMCIGF

SEQ ID NO: 2225 - protein, 14 aa, synthetic construct
MMKWCTPAWMCEEA

SEQ ID NO: 2226 - protein, 14 aa, synthetic construct
GDILCRPEWMCTGF

SEQ ID NO: 2227 - protein, 14 aa, synthetic construct
GDPWCIPAWMCMEF

SEQ ID NO: 2228 - protein, 14 aa, synthetic construct
MMKWCIPTWMCEME

SEQ ID NO: 2229 - protein, 14 aa, synthetic construct
ESIRCIPLWMCEGF

SEQ ID NO: 2230 - protein, 14 aa, synthetic construct
VIKWCTPAWMCTAL

SEQ ID NO: 2231 - protein, 14 aa, synthetic construct
SFAWCIPPWMCEIT

SEQ ID NO: 2232 - protein, 14 aa, synthetic construct
FTIWCIPEWMCLHE

SEQ ID NO: 2233 - protein, 14 aa, synthetic construct
IEKMCKPAWMCWAD

SEQ ID NO: 2234 - protein, 14 aa, synthetic construct
EKIWCVPAWMCTWL

SEQ ID NO: 2235 - protein, 14 aa, synthetic construct
VSKLCIPMWMCETS

SEQ ID NO: 2236 - protein, 14 aa, synthetic construct
GEYWCIPSWMCQLY

SEQ ID NO: 2237 - protein, 14 aa, synthetic construct
VDRWCVPVWMCEGL

SEQ ID NO: 2238 - protein, 14 aa, synthetic construct
LVNWCIPMWMCEGF

SEQ ID NO: 2239 - protein, 14 aa, synthetic construct
VEKWCIPTWMCELS

SEQ ID NO: 2240 - protein, 14 aa, synthetic construct
TEKLCIPEWMCFGM

SEQ ID NO: 2241 - protein, 14 aa, synthetic construct
TEMWCKPAWMCTGF

SEQ ID NO: 2242 - protein, 14 aa, synthetic construct
FAKWCTPEWMCVGF

SEQ ID NO: 2243 - protein, 14 aa, synthetic construct
WENWCTPAWMCSHM

SEQ ID NO: 2244 - protein, 14 aa, synthetic construct
ELHLCIPRGMCKFR

SEQ ID NO: 2245 - protein, 14 aa, synthetic construct
AEKWCIPAWMCEAM

SEQ ID NO: 2246 - protein, 14 aa, synthetic construct
VQNWCIPAWMCQGM

SEQ ID NO: 2247 - protein, 14 aa, synthetic construct
WDRLCTPAWMCTGF

SEQ ID NO: 2248 - protein, 14 aa, synthetic construct
DFKWCTPMWMCEHL

SEQ ID NO: 2249 - protein, 14 aa, synthetic construct
VVQWCIPAWMCAAQ

SEQ ID NO: 2250 - protein, 14 aa, synthetic construct
VSIWCRPAWMCESG

SEQ ID NO: 2251 - protein, 14 aa, synthetic construct
VEKLCKPIWMCNWQ

SEQ ID NO: 2252 - protein, 14 aa, synthetic construct
WPKWCTPPWMCFQD

SEQ ID NO: 2253 - protein, 14 aa, synthetic construct
FPKWCTPAWMCERS

SEQ ID NO: 2254 - protein, 14 aa, synthetic construct
MEKWCIPSWMCDVN

SEQ ID NO: 2255 - protein, 14 aa, synthetic construct
VEKLCRPSWMCEHM

SEQ ID NO: 2256 - protein, 14 aa, synthetic construct
WENWCRPEWMCTGL

SEQ ID NO: 2257 - protein, 14 aa, synthetic construct
GEKWCIPEWMCTTW

SEQ ID NO: 2258 - protein, 14 aa, synthetic construct
VEKWCVPQWMCGQM

SEQ ID NO: 2259 - protein, 14 aa, synthetic construct
LEKWCIPTWMCELF

SEQ ID NO: 2260 - protein, 14 aa, synthetic construct
DGKWCIPPWMCQST

SEQ ID NO: 2261 - protein, 14 aa, synthetic construct
WENWCTPRWMCEGF

SEQ ID NO: 2262 - protein, 14 aa, synthetic construct
TEMWCKPSWMCYGF

SEQ ID NO: 2263 - protein, 14 aa, synthetic construct
WINWCTPEWMCMGF

SEQ ID NO: 2264 - protein, 14 aa, synthetic construct
MDNWCTPSWMCVGF

SEQ ID NO: 2265 - protein, 14 aa, synthetic construct
DIKLCMPEWMCLGF

SEQ ID NO: 2266 - protein, 14 aa, synthetic construct
ARRSCVFRRGCVFM

SEQ ID NO: 2267 - protein, 14 aa, synthetic construct
AEHWCIPSWMCAGF

SEQ ID NO: 2268 - protein, 14 aa, synthetic construct
MPKWCTPAWMCAHQ

SEQ ID NO: 2269 - protein, 14 aa, synthetic construct
PVKWCIPTWMCAPV

SEQ ID NO: 2270 - protein, 14 aa, synthetic construct
HEKWCIPEWMCVVT

SEQ ID NO: 2271 - protein, 14 aa, synthetic construct
GEIWCIPPWMCYAP

SEQ ID NO: 2272 - protein, 14 aa, synthetic construct
FAKWCTPVWMCAGL

SEQ ID NO: 2273 - protein, 14 aa, synthetic construct
LENWCIPAWMCSGF

SEQ ID NO: 2274 - protein, 14 aa, synthetic construct
DGKWCIPAWMCVDM

SEQ ID NO: 2275 - protein, 14 aa, synthetic construct
WDKWCIPEWMCESM

SEQ ID NO: 2276 - protein, 14 aa, synthetic construct
FEKWCIPDWMCQVM

SEQ ID NO: 2277 - protein, 14 aa, synthetic construct
EGIWCTPAWMCMGF

SEQ ID NO: 2278 - protein, 14 aa, synthetic construct
VVKWCLPPWMCTDF

SEQ ID NO: 2279 - protein, 14 aa, synthetic construct
LVKWCTPAWMCEFI

SEQ ID NO: 2280 - protein, 14 aa, synthetic construct
LEMWCVPAWMCSGF

SEQ ID NO: 2281 - protein, 14 aa, synthetic construct
MVKWCKPAWMCDVI

SEQ ID NO: 2282 - protein, 14 aa, synthetic construct
WDKWCRPAWMCEST

SEQ ID NO: 2283 - protein, 14 aa, synthetic construct
DVKMCIPAWMCSFD

SEQ ID NO: 2284 - protein, 14 aa, synthetic construct
YIKWCTPSWMCEAS

SEQ ID NO: 2285 - protein, 14 aa, synthetic construct
VEKWCKPTWMCEMV

SEQ ID NO: 2286 - protein, 14 aa, synthetic construct
EFKWCTPSWMCAHL

SEQ ID NO: 2287 - protein, 14 aa, synthetic construct
VMNWCTPVWMCQGF

SEQ ID NO: 2288 - protein, 14 aa, synthetic construct
PWHWCIPEWMCAEY

SEQ ID NO: 2289 - protein, 14 aa, synthetic construct
FDKWCIPEWMCAVL

SEQ ID NO: 2290 - protein, 14 aa, synthetic construct
LVKWCIPEWMCEVL

SEQ ID NO: 2291 - protein, 14 aa, synthetic construct
FDNWCKPSWMCAGL

SEQ ID NO: 2292 - protein, 14 aa, synthetic construct
TMHWCIPQWMCETG

SEQ ID NO: 2293 - protein, 14 aa, synthetic construct
MAQWCTPAWMCSGF

SEQ ID NO: 2294 - protein, 14 aa, synthetic construct
SERWCIPTWMCQET

SEQ ID NO: 2295 - protein, 14 aa, synthetic construct
LPKWCTPEWMCIGF

SEQ ID NO: 2296 - protein, 14 aa, synthetic construct
LDKWCIPPWMCYSI

SEQ ID NO: 2297 - protein, 14 aa, synthetic construct
PPILCIPQWMCSPT

SEQ ID NO: 2298 - protein, 14 aa, synthetic construct
VGMLCKPSWMCDWL

SEQ ID NO: 2299 - protein, 14 aa, synthetic construct
IFEWCVPAWMCESR

SEQ ID NO: 2300 - protein, 14 aa, synthetic construct
VVKMCRPAWMCDLV

SEQ ID NO: 2301 - protein, 14 aa, synthetic construct
LENWCIPRWMCHGF

SEQ ID NO: 2302 - protein, 14 aa, synthetic construct
YEKWCTPPWMCEML

SEQ ID NO: 2303 - protein, 14 aa, synthetic construct
VEKWCTPPWMCAGW

SEQ ID NO: 2304 - protein, 14 aa, synthetic construct
LDNWCRPLWMCTGF

SEQ ID NO: 2305 - protein, 14 aa, synthetic construct
EPKLCTPTWMCIGF

SEQ ID NO: 2306 - protein, 14 aa, synthetic construct
LMKWCIPEWMCVDS

SEQ ID NO: 2307 - protein, 14 aa, synthetic construct
LVKWCTPSWMCINL

SEQ ID NO: 2308 - protein, 14 aa, synthetic construct
PVKWCIPDWMCAYL

SEQ ID NO: 2309 - protein, 14 aa, synthetic construct
EVKWCTPPWMCMFD

SEQ ID NO: 2310 - protein, 14 aa, synthetic construct
FDKWCIPTWMCELV

SEQ ID NO: 2311 - protein, 14 aa, synthetic construct
MGKWCIPPWMCVVD

SEQ ID NO: 2312 - protein, 14 aa, synthetic construct
GSNWCKPAWMCEIM

SEQ ID NO: 2313 - protein, 14 aa, synthetic construct
NFHLCTPQWMCTGF

SEQ ID NO: 2314 - protein, 14 aa, synthetic construct
IDKWCIPAWMCVSN

SEQ ID NO: 2315 - protein, 14 aa, synthetic construct
IPKWCTPAWMCESM

SEQ ID NO: 2316 - protein, 14 aa, synthetic construct
HEMWCRPAWMCDGF

SEQ ID NO: 2317 - protein, 14 aa, synthetic construct
EVKWCTPAWMCEGF

SEQ ID NO: 2318 - protein, 14 aa, synthetic construct
LEKLCIPSWMCEGM

SEQ ID NO: 2319 - protein, 14 aa, synthetic construct
FEKWCVPIWMCRDS

SEQ ID NO: 2320 - protein, 14 aa, synthetic construct
IDNWCRPLWMCHGF

SEQ ID NO: 2321 - protein, 14 aa, synthetic construct
VTKWCIPEWMCEYI

SEQ ID NO: 2322 - protein, 14 aa, synthetic construct
LPHWCTPLWMCEGF

SEQ ID NO: 2323 - protein, 14 aa, synthetic construct
QDMWCIPPWMCWAQ

SEQ ID NO: 2324 - protein, 14 aa, synthetic construct
HPKWCTPAWMCVML

SEQ ID NO: 2325 - protein, 14 aa, synthetic construct
EFVKCVPAWMCEWT

SEQ ID NO: 2326 - protein, 14 aa, synthetic construct
LQKLCIPEWMCLNM

SEQ ID NO: 2327 - protein, 14 aa, synthetic construct
DTHMCRPLWMCTGL

SEQ ID NO: 2328 - protein, 14 aa, synthetic construct
GEKWCIPPWMCITN

SEQ ID NO: 2329 - protein, 14 aa, synthetic construct
LEKWCIPAWMCEVF

SEQ ID NO: 2330 - protein, 14 aa, synthetic construct
PERWCIPVWMCESG

SEQ ID NO: 2331 - protein, 14 aa, synthetic construct
VVQLCSPVWMCEGF

SEQ ID NO: 2332 - protein, 14 aa, synthetic construct
PIRLCIPEWMCEMV

SEQ ID NO: 2333 - protein, 14 aa, synthetic construct
MVKWCFPEWMCWTD

SEQ ID NO: 2334 - protein, 14 aa, synthetic construct
LDKWCTPSWMCYGM

SEQ ID NO: 2335 - protein, 14 aa, synthetic construct
IVKWCTPPWMCTIY

SEQ ID NO: 2336 - protein, 14 aa, synthetic construct
VIKLCSPPWMCIGL

SEQ ID NO: 2337 - protein, 14 aa, synthetic construct
TEIWCIPPWMCDGQ

SEQ ID NO: 2338 - protein, 14 aa, synthetic construct
QLNWCIPEWMCQGL

SEQ ID NO: 2339 - protein, 14 aa, synthetic construct
ALMWCIPQWMCQDQ

SEQ ID NO: 2340 - protein, 14 aa, synthetic construct
VQKWCIPAWMCDYV

SEQ ID NO: 2341 - protein, 14 aa, synthetic construct
ELKRCTPSWMCEGI

SEQ ID NO: 2342 - protein, 14 aa, synthetic construct
LEKWCTPLWMCVGI

SEQ ID NO: 2343 - protein, 14 aa, synthetic construct
ELQRCTPWWMCFDV

SEQ ID NO: 2344 - protein, 14 aa, synthetic construct
IIKWCIPEWMCYMH

SEQ ID NO: 2345 - protein, 14 aa, synthetic construct
EGKWCIPPWMCERN

SEQ ID NO: 2346 - protein, 14 aa, synthetic construct
FEKWCIPSWMCENA

SEQ ID NO: 2347 - protein, 14 aa, synthetic construct
VEKWCIPSWMCAEV

SEQ ID NO: 2348 - protein, 14 aa, synthetic construct
DIKWCIPPWMCQVE

SEQ ID NO: 2349 - protein, 14 aa, synthetic construct
WPMLCIPEWMCDGL

SEQ ID NO: 2350 - protein, 14 aa, synthetic construct
IVKWCTPEWMCVGF

SEQ ID NO: 2351 - protein, 14 aa, synthetic construct
SLNWCIPEWMCEGF

SEQ ID NO: 2352 - protein, 14 aa, synthetic construct
EAKWCIPAWMCEDA

SEQ ID NO: 2353 - protein, 14 aa, synthetic construct
ASPMCIPEWMCSGV

SEQ ID NO: 2354 - protein, 14 aa, synthetic construct
MERWCKPAWMCADM

SEQ ID NO: 2355 - protein, 14 aa, synthetic construct
DLPWCIPAWMCMGL

SEQ ID NO: 2356 - protein, 14 aa, synthetic construct
VHKWCIPSWMCEAP

SEQ ID NO: 2357 - protein, 14 aa, synthetic construct
QMKWCTPEWMCVGM

SEQ ID NO: 2358 - protein, 14 aa, synthetic construct
MDHWCTPPWMCEGW

SEQ ID NO: 2359 - protein, 14 aa, synthetic construct
VPKWCTPSWMCEST

SEQ ID NO: 2360 - protein, 14 aa, synthetic construct
EVKWCTPEWMCAFL

SEQ ID NO: 2361 - protein, 14 aa, synthetic construct
IDKWCIPMWMCEMS

SEQ ID NO: 2362 - protein, 14 aa, synthetic construct
EVHRCIPAWMCTTP

SEQ ID NO: 2363 - protein, 14 aa, synthetic construct
VDHWCTPAWMCDGF

SEQ ID NO: 2364 - protein, 14 aa, synthetic construct
VAKWCTPPWMCAWL

SEQ ID NO: 2365 - protein, 14 aa, synthetic construct
VMPWCIPQWMCVGE

SEQ ID NO: 2366 - protein, 14 aa, synthetic construct
EAIWCVPKWMCEGM

SEQ ID NO: 2367 - protein, 14 aa, synthetic construct
VPKWCTPAWMCNWN

SEQ ID NO: 2368 - protein, 14 aa, synthetic construct
FPQWCIPIWMCEHT

SEQ ID NO: 2369 - protein, 14 aa, synthetic construct
VVHWCIPEWMCERI

SEQ ID NO: 2370 - protein, 14 aa, synthetic construct
VDKWCIPQWMCDDQ

SEQ ID NO: 2371 - protein, 14 aa, synthetic construct
APKLCIPNWMCVSM

SEQ ID NO: 2372 - protein, 14 aa, synthetic construct
WLNWCTPEWMCNGF

SEQ ID NO: 2373 - protein, 14 aa, synthetic construct
VEKWCTPPWMCSLF

SEQ ID NO: 2374 - protein, 14 aa, synthetic construct
AWKSCIPSWMCEVQ

SEQ ID NO: 2375 - protein, 14 aa, synthetic construct
DTMRCVPEWMCTGF

SEQ ID NO: 2376 - protein, 14 aa, synthetic construct
EHIWCKPDWMCSGF

SEQ ID NO: 2377 - protein, 14 aa, synthetic construct
EMKWCIPAWMCQSH

SEQ ID NO: 2378 - protein, 14 aa, synthetic construct
EGKWCTPIWMCQGF

SEQ ID NO: 2379 - protein, 14 aa, synthetic construct
PIKLCTPSWMCIGF

SEQ ID NO: 2380 - protein, 14 aa, synthetic construct
YLHSCTPAWMCTGF

SEQ ID NO: 2381 - protein, 14 aa, synthetic construct
AAKMCVPWWMCEVM

SEQ ID NO: 2382 - protein, 14 aa, synthetic construct
VSIMCKPMWMCSGT

SEQ ID NO: 2383 - protein, 14 aa, synthetic construct
PVKWCIPSWMCSVD

SEQ ID NO: 2384 - protein, 14 aa, synthetic construct
SEKWCIPDWMCQVW

SEQ ID NO: 2385 - protein, 14 aa, synthetic construct
YDHWCTPMWMCHGM

SEQ ID NO: 2386 - protein, 14 aa, synthetic construct
FEMWCTPSWMCDGF

SEQ ID NO: 2387 - protein, 14 aa, synthetic construct
IGPWCIPPWMCDHR

SEQ ID NO: 2388 - protein, 14 aa, synthetic construct
QGNWCKPAWMCSGF

SEQ ID NO: 2389 - protein, 14 aa, synthetic construct
VAKMCIPSWMCAEQ

SEQ ID NO: 2390 - protein, 14 aa, synthetic construct
VGNWCKPAWMCEMM

SEQ ID NO: 2391 - protein, 14 aa, synthetic construct
ADKWCTPTWMCQWL

SEQ ID NO: 2392 - protein, 14 aa, synthetic construct
ADKWCIPEWMCEMN

SEQ ID NO: 2393 - protein, 14 aa, synthetic construct
AEKLCIPPWMCMLS

SEQ ID NO: 2394 - protein, 14 aa, synthetic construct
IEKWCIPEWMCEYT

SEQ ID NO: 2395 - protein, 14 aa, synthetic construct
DWRLCIPEWMCERL

SEQ ID NO: 2396 - protein, 14 aa, synthetic construct
WDNWCTPLWMCQGF

SEQ ID NO: 2397 - protein, 14 aa, synthetic construct
QVNWCIPPWMCAGL

SEQ ID NO: 2398 - protein, 14 aa, synthetic construct
PEKLCIPDWMCHWD

SEQ ID NO: 2399 - protein, 14 aa, synthetic construct
WSNWCTPRWVCKTI

SEQ ID NO: 2400 - protein, 14 aa, synthetic construct
SEHWCVPSWMCYGF

SEQ ID NO: 2401 - protein, 14 aa, synthetic construct
ESKWCTPPWMCMTD

SEQ ID NO: 2402 - protein, 14 aa, synthetic construct
VHQMCQPWWMCWET

SEQ ID NO: 2403 - protein, 14 aa, synthetic construct
FEKWCIPSWMCSGP

SEQ ID NO: 2404 - protein, 14 aa, synthetic construct
VEKWCIPQWMCAEM

SEQ ID NO: 2405 - protein, 14 aa, synthetic construct
VEKWCIPTWMCQAM

SEQ ID NO: 2406 - protein, 14 aa, synthetic construct
IVKWCVPEWMCEGT

SEQ ID NO: 2407 - protein, 14 aa, synthetic construct
ETRWCVPEWMCYGI

SEQ ID NO: 2408 - protein, 14 aa, synthetic construct
FEKWCIPAWMCAAV

SEQ ID NO: 2409 - protein, 14 aa, synthetic construct
VETWCTPRWMCEGF

SEQ ID NO: 2410 - protein, 14 aa, synthetic construct
VVHWCIPSWMCTEN

SEQ ID NO: 2411 - protein, 14 aa, synthetic construct
WGKLCIPEWMCTTQ

SEQ ID NO: 2412 - protein, 14 aa, synthetic construct
PDHWCIPSWMCMSQ

SEQ ID NO: 2413 - protein, 14 aa, synthetic construct
QGIMCIPEWMCSAI

SEQ ID NO: 2414 - protein, 14 aa, synthetic construct
IPKLCKPSWMCLFY

SEQ ID NO: 2415 - protein, 14 aa, synthetic construct
LGNWCIPEWMCYGM

SEQ ID NO: 2416 - protein, 14 aa, synthetic construct
INMWCIPAWMCQNT

SEQ ID NO: 2417 - protein, 14 aa, synthetic construct
EAKWCIPAWMCSGV

SEQ ID NO: 2418 - protein, 14 aa, synthetic construct
MERWCIPEWMCATT

SEQ ID NO: 2419 - protein, 14 aa, synthetic construct
SENWCIPSWMCQGF

SEQ ID NO: 2420 - protein, 14 aa, synthetic construct
GVNWCIPDWMCVGM

SEQ ID NO: 2421 - protein, 14 aa, synthetic construct
EWKWCTPSWMCEDA

SEQ ID NO: 2422 - protein, 14 aa, synthetic construct
QEKWCIPMWMCESL

SEQ ID NO: 2423 - protein, 14 aa, synthetic construct
VHNWCIPSWMCEGL

SEQ ID NO: 2424 - protein, 14 aa, synthetic construct
SAMLCKPQWMCDGF

SEQ ID NO: 2425 - protein, 14 aa, synthetic construct
LENWCKPAWMCRGS

SEQ ID NO: 2426 - protein, 14 aa, synthetic construct
FEKWCIPPWMCAVH

SEQ ID NO: 2427 - protein, 14 aa, synthetic construct
VVKWCSPPWMCDFL

SEQ ID NO: 2428 - protein, 14 aa, synthetic construct
VDPLCRPAWMCFGM

SEQ ID NO: 2429 - protein, 14 aa, synthetic construct
MNTWCKPAWMCEGL

SEQ ID NO: 2430 - protein, 14 aa, synthetic construct
SERWCIPEWMCSMP

SEQ ID NO: 2431 - protein, 14 aa, synthetic construct
GEIWCIPRWMCESF

SEQ ID NO: 2432 - protein, 14 aa, synthetic construct
WENWCTPSWMCSVL

SEQ ID NO: 2433 - protein, 14 aa, synthetic construct
EIKWCVPQWMCENQ

SEQ ID NO: 2434 - protein, 14 aa, synthetic construct
EMIWCRPAWMCEGI

SEQ ID NO: 2435 - protein, 14 aa, synthetic construct
YAKWCIPEWMCAVS

SEQ ID NO: 2436 - protein, 14 aa, synthetic construct
EIHLCKPPWMCDWL

SEQ ID NO: 2437 - protein, 14 aa, synthetic construct
AEKWCIPPWMCEWV

SEQ ID NO: 2438 - protein, 14 aa, synthetic construct
VTAWCIPEWMCVGV

SEQ ID NO: 2439 - protein, 14 aa, synthetic construct
EIKWCRPGWMCKVR

SEQ ID NO: 2440 - protein, 14 aa, synthetic construct
ILKACIPDWMCEGS

SEQ ID NO: 2441 - protein, 14 aa, synthetic construct
EFKWCTPPWMCQWD

SEQ ID NO: 2442 - protein, 14 aa, synthetic construct
SDKWCIPPWMCEVA

SEQ ID NO: 2443 - protein, 14 aa, synthetic construct
WDKWCIPEWMCVTQ

SEQ ID NO: 2444 - protein, 14 aa, synthetic construct
DGLLCRPLWMCQFL

SEQ ID NO: 2445 - protein, 14 aa, synthetic construct
PLPWCIPVWMCSMI

SEQ ID NO: 2446 - protein, 14 aa, synthetic construct
LVKWCTPPWMCESQ

SEQ ID NO: 2447 - protein, 14 aa, synthetic construct
LMKWCIPDWMCSHV

SEQ ID NO: 2448 - protein, 14 aa, synthetic construct
DANWCKPTWMCAGF

SEQ ID NO: 2449 - protein, 14 aa, synthetic construct
FEMLCTPPWMCVGL

SEQ ID NO: 2450 - protein, 14 aa, synthetic construct
EGKWCIPEWMCSAS

SEQ ID NO: 2451 - protein, 14 aa, synthetic construct
TERWCVPAWMCTLV

SEQ ID NO: 2452 - protein, 14 aa, synthetic construct
VYKWCTPPWMCTQM

SEQ ID NO: 2453 - protein, 14 aa, synthetic construct
VLKWCIPTWMCETQ

SEQ ID NO: 2454 - protein, 14 aa, synthetic construct
VQKWCIPEWMCAVA

SEQ ID NO: 2455 - protein, 14 aa, synthetic construct
LEKWCTPSWMCIGI

SEQ ID NO: 2456 - protein, 14 aa, synthetic construct
EHKWCIPSWMCADM

SEQ ID NO: 2457 - protein, 14 aa, synthetic construct
EMKLCRPAWMCEYM

SEQ ID NO: 2458 - protein, 14 aa, synthetic construct
IPKWCTPVWMCEGM

SEQ ID NO: 2459 - protein, 14 aa, synthetic construct
VWHWCTPPWMCNAE

SEQ ID NO: 2460 - protein, 14 aa, synthetic construct
AEKWCIPNWMCEAG

SEQ ID NO: 2461 - protein, 14 aa, synthetic construct
MVNWCTPPWMCWGF

SEQ ID NO: 2462 - protein, 14 aa, synthetic construct
SAPWCIPEWMCFSL

SEQ ID NO: 2463 - protein, 14 aa, synthetic construct
VEKWCIPQWMCVSQ

SEQ ID NO: 2464 - protein, 14 aa, synthetic construct
IMKLCMPPWMCAAM

SEQ ID NO: 2465 - protein, 14 aa, synthetic construct
ITNWCKPAWMCEVS

SEQ ID NO: 2466 - protein, 14 aa, synthetic construct
VHIWCIPQWMCMDR

SEQ ID NO: 2467 - protein, 14 aa, synthetic construct
YEIRCIPPWMCAFD

SEQ ID NO: 2468 - protein, 14 aa, synthetic construct
IEKWCTPAWMCYGI

SEQ ID NO: 2469 - protein, 14 aa, synthetic construct
EHKWCIPDWMCMVA

SEQ ID NO: 2470 - protein, 14 aa, synthetic construct
LDKWCTPEWMCWGI

SEQ ID NO: 2471 - protein, 14 aa, synthetic construct
EGRWCIPSWMCVGV

SEQ ID NO: 2472 - protein, 14 aa, synthetic construct
VSKWCTPEWMCTGF

SEQ ID NO: 2473 - protein, 14 aa, synthetic construct
DVIRCTPDWMCTGF

SEQ ID NO: 2474 - protein, 14 aa, synthetic construct
FERWCIPAWMCQSD

SEQ ID NO: 2475 - protein, 14 aa, synthetic construct
ETKWCFPPWMCAGS

SEQ ID NO: 2476 - protein, 14 aa, synthetic construct
AMHWCIPKWMCETS

SEQ ID NO: 2477 - protein, 14 aa, synthetic construct
EMKWCIPDWMCAAG

SEQ ID NO: 2478 - protein, 14 aa, synthetic construct
EVKLCRPPWMCEIF

SEQ ID NO: 2479 - protein, 14 aa, synthetic construct
GSHWCIPPWMCQMS

SEQ ID NO: 2480 - protein, 14 aa, synthetic construct
DIRWCIPDWMCTET

SEQ ID NO: 2481 - protein, 14 aa, synthetic construct
VVPWCIPVWMCNSQ

SEQ ID NO: 2482 - protein, 14 aa, synthetic construct
YEKWCTPAWMCEYQ

SEQ ID NO: 2483 - protein, 14 aa, synthetic construct
VQKWCVPEWMCGSW

SEQ ID NO: 2484 - protein, 14 aa, synthetic construct
GEKWCIPEWMCVHL

SEQ ID NO: 2485 - protein, 14 aa, synthetic construct
ESMLCRPVWMCVGF

SEQ ID NO: 2486 - protein, 14 aa, synthetic construct
DENWCKPLWMCKGF

SEQ ID NO: 2487 - protein, 14 aa, synthetic construct
GDRLCVPEWMCEML

SEQ ID NO: 2488 - protein, 14 aa, synthetic construct
MAMMCIPPWMCDTM

SEQ ID NO: 2489 - protein, 14 aa, synthetic construct
ENKWCIPTWMCAHE

SEQ ID NO: 2490 - protein, 14 aa, synthetic construct
YVNWCTPEWMCVGF

SEQ ID NO: 2491 - protein, 14 aa, synthetic construct
VIPWCIPEWMCTAS

SEQ ID NO: 2492 - protein, 14 aa, synthetic construct
VEHWCTPRWMCRGF

SEQ ID NO: 2493 - protein, 14 aa, synthetic construct
SLHLCIPQWMCGIS

SEQ ID NO: 2494 - protein, 14 aa, synthetic construct
ITKWCTPAWMCAHL

SEQ ID NO: 2495 - protein, 14 aa, synthetic construct
EPKLCRPAWMCVGM

SEQ ID NO: 2496 - protein, 14 aa, synthetic construct
LIKWCTPPWMCEQL

SEQ ID NO: 2497 - protein, 14 aa, synthetic construct
LDKLCIPSWMCWSH

SEQ ID NO: 2498 - protein, 14 aa, synthetic construct
HEKLCIPWWMCEDH

SEQ ID NO: 2499 - protein, 14 aa, synthetic construct
VHMRCIPEWMCQVF

SEQ ID NO: 2500 - protein, 14 aa, synthetic construct
TEKWCIPEWMCAHQ

SEQ ID NO: 2501 - protein, 14 aa, synthetic construct
WSKSCTPAWMCEGF

SEQ ID NO: 2502 - protein, 14 aa, synthetic construct
EFKWCIPAWMCTAA

SEQ ID NO: 2503 - protein, 14 aa, synthetic construct
EIKWCTPAWMCEGF

SEQ ID NO: 2504 - protein, 14 aa, synthetic construct
LSHWCSPQWMCSGF

SEQ ID NO: 2505 - protein, 14 aa, synthetic construct
WYKWCTPAWMCEFT

SEQ ID NO: 2506 - protein, 14 aa, synthetic construct
EHHWCIPKWMCNEV

SEQ ID NO: 2507 - protein, 14 aa, synthetic construct
VDNWCVPRWMCDGF

SEQ ID NO: 2508 - protein, 14 aa, synthetic construct
MTPWCKPAWMCQGI

SEQ ID NO: 2509 - protein, 14 aa, synthetic construct
ESHLCIPAWMCDVQ

SEQ ID NO: 2510 - protein, 14 aa, synthetic construct
HAMWCIPAWMCENL

SEQ ID NO: 2511 - protein, 14 aa, synthetic construct
LYKWCMPAWMCEQK

SEQ ID NO: 2512 - protein, 14 aa, synthetic construct
LADWCRPVWMCEGF

SEQ ID NO: 2513 - protein, 14 aa, synthetic construct
LEKWCIPSWMCDGM

SEQ ID NO: 2514 - protein, 14 aa, synthetic construct
DVNWCTPPWMCWGF

SEQ ID NO: 2515 - protein, 14 aa, synthetic construct
VEKWCIPSWMCQEL

SEQ ID NO: 2516 - protein, 14 aa, synthetic construct
GEIWCIPAWMCNTG

SEQ ID NO: 2517 - protein, 14 aa, synthetic construct
EYNWCTPRWMCKGF

SEQ ID NO: 2518 - protein, 14 aa, synthetic construct
HDKWCIPEWMCISL

SEQ ID NO: 2519 - protein, 14 aa, synthetic construct
MERWCIPEWMCERT

SEQ ID NO: 2520 - protein, 14 aa, synthetic construct
DLKLCKPEWMCNGM

SEQ ID NO: 2521 - protein, 14 aa, synthetic construct
VDRLCTPEWMCSGF

SEQ ID NO: 2522 - protein, 14 aa, synthetic construct
LEKWCIPAWMCAVL

SEQ ID NO: 2523 - protein, 14 aa, synthetic construct
PTKWCIPEWMCSVI

SEQ ID NO: 2524 - protein, 14 aa, synthetic construct
ALHWCIPEWMCSSM

SEQ ID NO: 2525 - protein, 14 aa, synthetic construct
QDHWCVPQWMCEML

SEQ ID NO: 2526 - protein, 14 aa, synthetic construct
THNWCTPQWMCDGF

SEQ ID NO: 2527 - protein, 14 aa, synthetic construct
PGKWCIPAWMCSLV

SEQ ID NO: 2528 - protein, 14 aa, synthetic construct
TEKWCIPSWMCEIS

SEQ ID NO: 2529 - protein, 14 aa, synthetic construct
VIPLCSPPWMCFMS

SEQ ID NO: 2530 - protein, 14 aa, synthetic construct
PEKWCIPEWMCDAL

SEQ ID NO: 2531 - protein, 14 aa, synthetic construct
GVKWCTPPWMCEVA

SEQ ID NO: 2532 - protein, 14 aa, synthetic construct
WAQWCTPSWMCEGF

SEQ ID NO: 2533 - protein, 14 aa, synthetic construct
EVKWCIPSWMCESE

SEQ ID NO: 2534 - protein, 14 aa, synthetic construct
VPKQCVPEWMCSGF

SEQ ID NO: 2535 - protein, 14 aa, synthetic construct
SENWCIPAWMCSGF

SEQ ID NO: 2536 - protein, 14 aa, synthetic construct
EPKWCTPEWMCLNL

SEQ ID NO: 2537 - protein, 14 aa, synthetic construct
GHQWCIPQWMCVGL

SEQ ID NO: 2538 - protein, 14 aa, synthetic construct
TEKWCIPQWMCEAT

SEQ ID NO: 2539 - protein, 14 aa, synthetic construct
FLKWCTPEWMCSDV

SEQ ID NO: 2540 - protein, 14 aa, synthetic construct
AIKWCTPPWMCDWH

SEQ ID NO: 2541 - protein, 14 aa, synthetic construct
LFKVCTPSWMCSGF

SEQ ID NO: 2542 - protein, 14 aa, synthetic construct
LAYWCTPAWMCEGF

SEQ ID NO: 2543 - protein, 14 aa, synthetic construct
SELWCIPPWMCNFL

SEQ ID NO: 2544 - protein, 14 aa, synthetic construct
LVKWCIPQWMCEQA

SEQ ID NO: 2545 - protein, 14 aa, synthetic construct
LLKWCTPPWMCELH

SEQ ID NO: 2546 - protein, 14 aa, synthetic construct
TDMWCIPPWMCERI

SEQ ID NO: 2547 - protein, 14 aa, synthetic construct
LSKWCIPEWMCAVM

SEQ ID NO: 2548 - protein, 14 aa, synthetic construct
QLNWCRPAWMCEGF

SEQ ID NO: 2549 - protein, 14 aa, synthetic construct
EIQWCTPSWMCPWL

SEQ ID NO: 2550 - protein, 14 aa, synthetic construct
MPNWCTPTWMCQGF

SEQ ID NO: 2551 - protein, 14 aa, synthetic construct
FNKWCVPAWMCSDM

SEQ ID NO: 2552 - protein, 14 aa, synthetic construct
PRKWCIPAWMCEII

SEQ ID NO: 2553 - protein, 14 aa, synthetic construct
VSAWCIPPWMCGTN

SEQ ID NO: 2554 - protein, 14 aa, synthetic construct
DFKWCIPTWMCEVY

SEQ ID NO: 2555 - protein, 14 aa, synthetic construct
HPNWCTPPWMCLGL

SEQ ID NO: 2556 - protein, 14 aa, synthetic construct
GTMWCIPPWMCSAD

SEQ ID NO: 2557 - protein, 14 aa, synthetic construct
VVKWCIPTWMCENS

SEQ ID NO: 2558 - protein, 14 aa, synthetic construct
LMNWCIPPWMCSAQ

SEQ ID NO: 2559 - protein, 14 aa, synthetic construct
LMKWCIPQWMCQLD

SEQ ID NO: 2560 - protein, 14 aa, synthetic construct
LVKLCIPEWMCSEG

SEQ ID NO: 2561 - protein, 14 aa, synthetic construct
SEKLCIPEWMCAQA

SEQ ID NO: 2562 - protein, 14 aa, synthetic construct
GEIWCTPKWMCDGF

SEQ ID NO: 2563 - protein, 14 aa, synthetic construct
NIIRCTPAWMCDGF

SEQ ID NO: 2564 - protein, 14 aa, synthetic construct
LENWCKPAWMCWGM

SEQ ID NO: 2565 - protein, 14 aa, synthetic construct
IIKWCTPEWMCVGF

SEQ ID NO: 2566 - protein, 14 aa, synthetic construct
IDKWCIPAWMCEST

SEQ ID NO: 2567 - protein, 14 aa, synthetic construct
GTNWCTPAWMCAGF

SEQ ID NO: 2568 - protein, 14 aa, synthetic construct
ADKWCIPEWMCQQD

SEQ ID NO: 2569 - protein, 14 aa, synthetic construct
NERWCIPSWMCQEA

SEQ ID NO: 2570 - protein, 14 aa, synthetic construct
PAKWCIPMWMCQVD

SEQ ID NO: 2571 - protein, 14 aa, synthetic construct
VELLCKPPWMCSGL

SEQ ID NO: 2572 - protein, 14 aa, synthetic construct
PVNWCKPPWMCEMW

SEQ ID NO: 2573 - protein, 14 aa, synthetic construct
MEMWCRPAWMCAHS

SEQ ID NO: 2574 - protein, 14 aa, synthetic construct
MMKWCTPEWMCAMV

SEQ ID NO: 2575 - protein, 14 aa, synthetic construct
DMRWCIPAWMCEDR

SEQ ID NO: 2576 - protein, 14 aa, synthetic construct
VDRWCIPEWMCNEL

SEQ ID NO: 2577 - protein, 14 aa, synthetic construct
TEKWCIPAWMCQVS

SEQ ID NO: 2578 - protein, 14 aa, synthetic construct
PNIWCTPLWMCEGL

SEQ ID NO: 2579 - protein, 14 aa, synthetic construct
YSHLCIPSWMCSWT

SEQ ID NO: 2580 - protein, 14 aa, synthetic construct
ALKWCIPDWMCSQP

SEQ ID NO: 2581 - protein, 14 aa, synthetic construct
GDRWCIPEWMCGVI

SEQ ID NO: 2582 - protein, 14 aa, synthetic construct
EMHWCIPAWMCPDG

SEQ ID NO: 2583 - protein, 14 aa, synthetic construct
ITKLCTPPWMCTMV

SEQ ID NO: 2584 - protein, 14 aa, synthetic construct
AENWCRPSWMCEGF

SEQ ID NO: 2585 - protein, 14 aa, synthetic construct
FAKWCTPQWMCSAM

SEQ ID NO: 2586 - protein, 14 aa, synthetic construct
VVKWCSPPWMCEYF

SEQ ID NO: 2587 - protein, 14 aa, synthetic construct
HQNWCIPAWMCHGM

SEQ ID NO: 2588 - protein, 14 aa, synthetic construct
WDMRCTPIWMCEGF

SEQ ID NO: 2589 - protein, 14 aa, synthetic construct
GINWCIPPWMCQSE

SEQ ID NO: 2590 - protein, 14 aa, synthetic construct
YTNWCIPSWMCEGF

SEQ ID NO: 2591 - protein, 14 aa, synthetic construct
GEKWCIPSWMCEIT

SEQ ID NO: 2592 - protein, 14 aa, synthetic construct
LEKWCTPPWMCMGF

SEQ ID NO: 2593 - protein, 14 aa, synthetic construct
IIKWCKPLWMCESI

SEQ ID NO: 2594 - protein, 14 aa, synthetic construct
IEKWCIPQWMCSAA

SEQ ID NO: 2595 - protein, 14 aa, synthetic construct
IPRMCTPAWMCEWS

SEQ ID NO: 2596 - protein, 14 aa, synthetic construct
FAILCKPMWMCEHI

SEQ ID NO: 2597 - protein, 14 aa, synthetic construct
MPKWCIPTWMCEST

SEQ ID NO: 2598 - protein, 14 aa, synthetic construct
AVKLCTPMWMCMGF

SEQ ID NO: 2599 - protein, 14 aa, synthetic construct
GGKWCKPSWMCFGM

SEQ ID NO: 2600 - protein, 14 aa, synthetic construct
MINWCTPAWMCTGF

SEQ ID NO: 2601 - protein, 14 aa, synthetic construct
EPKWCIPQWMCERF

SEQ ID NO: 2602 - protein, 14 aa, synthetic construct
AEKWCIPPWMCVND

SEQ ID NO: 2603 - protein, 14 aa, synthetic construct
VEKWCTPRWMCEGF

SEQ ID NO: 2604 - protein, 14 aa, synthetic construct
HVKWCTPAWMCVSN

SEQ ID NO: 2605 - protein, 14 aa, synthetic construct
ELNWCTPPWMCNPM

SEQ ID NO: 2606 - protein, 14 aa, synthetic construct
VDKQCRPAWMCEIW

SEQ ID NO: 2607 - protein, 14 aa, synthetic construct
VEKWCIPAWMCQQS

SEQ ID NO: 2608 - protein, 14 aa, synthetic construct
NSNWCIPSWMCADI

SEQ ID NO: 2609 - protein, 14 aa, synthetic construct
VEKWCIPPWMCVNS

SEQ ID NO: 2610 - protein, 14 aa, synthetic construct
IHMLCSPPWMCVGL

SEQ ID NO: 2611 - protein, 14 aa, synthetic construct
DVMWCIPPWMCEHR

SEQ ID NO: 2612 - protein, 14 aa, synthetic construct
NVKWCTPPWMCFLD

SEQ ID NO: 2613 - protein, 14 aa, synthetic construct
THKWCIPVWMCEHQ

SEQ ID NO: 2614 - protein, 14 aa, synthetic construct
WENWCTPEWMCNGF

SEQ ID NO: 2615 - protein, 14 aa, synthetic construct
MDNWCTPPWMCHGF

SEQ ID NO: 2616 - protein, 14 aa, synthetic construct
WVQWCIPPWMCEPS

SEQ ID NO: 2617 - protein, 14 aa, synthetic construct
SMKWCTPAWMCERL

SEQ ID NO: 2618 - protein, 14 aa, synthetic construct
FANWCTPSWMCNFT

SEQ ID NO: 2619 - protein, 14 aa, synthetic construct
LTKWCIPEWMCAVE

SEQ ID NO: 2620 - protein, 14 aa, synthetic construct
VQNWCIPAWMCEGK

SEQ ID NO: 2621 - protein, 14 aa, synthetic construct
EAKWCTPPWMCMSM

SEQ ID NO: 2622 - protein, 14 aa, synthetic construct
QNTWCIPPWMCEVF

SEQ ID NO: 2623 - protein, 14 aa, synthetic construct
YDRLCIPMWMCSSV

SEQ ID NO: 2624 - protein, 14 aa, synthetic construct
EWKWCTPPWMCQYE

SEQ ID NO: 2625 - protein, 14 aa, synthetic construct
IEKWCIPLWMCEMQ

SEQ ID NO: 2626 - protein, 14 aa, synthetic construct
MEIWCKPAWMCEST

SEQ ID NO: 2627 - protein, 14 aa, synthetic construct
PEKWCIPDWMCTVY

SEQ ID NO: 2628 - protein, 14 aa, synthetic construct
EFKMCIPQWMCQHQ

SEQ ID NO: 2629 - protein, 14 aa, synthetic construct
LEKWCMPPWMCSGT

SEQ ID NO: 2630 - protein, 14 aa, synthetic construct
FVNWCIPTWMCPEI

SEQ ID NO: 2631 - protein, 14 aa, synthetic construct
EARWCTPPWMCAYM

SEQ ID NO: 2632 - protein, 14 aa, synthetic construct
GMLACTPAWMCEGF

SEQ ID NO: 2633 - protein, 14 aa, synthetic construct
MEQWCIPQWMCSGF

SEQ ID NO: 2634 - protein, 14 aa, synthetic construct
LEKWCTPVWMCEGV

SEQ ID NO: 2635 - protein, 14 aa, synthetic construct
SDNWCKPKWMCETI

SEQ ID NO: 2636 - protein, 14 aa, synthetic construct
VSNWCIPRGLCTQM

SEQ ID NO: 2637 - protein, 14 aa, synthetic construct
LDKWCIPPWMCETV

SEQ ID NO: 2638 - protein, 14 aa, synthetic construct
LEKWCIPTWMCEMT

SEQ ID NO: 2639 - protein, 14 aa, synthetic construct
WDHWCTPAWMCFNA

SEQ ID NO: 2640 - protein, 14 aa, synthetic construct
HSHWCIPPWMCTFV

SEQ ID NO: 2641 - protein, 14 aa, synthetic construct
VEKLCIPHWMCEAS

SEQ ID NO: 2642 - protein, 14 aa, synthetic construct
GPTLCIPAWMCSGM

SEQ ID NO: 2643 - protein, 14 aa, synthetic construct
SVHWCTPPWMCQGF

SEQ ID NO: 2644 - protein, 14 aa, synthetic construct
VDKWCIPAWMCVSA

SEQ ID NO: 2645 - protein, 14 aa, synthetic construct
PEKWCIPPWMCTNF

SEQ ID NO: 2646 - protein, 14 aa, synthetic construct
EVKWCTPSWMCSGL

SEQ ID NO: 2647 - protein, 14 aa, synthetic construct
FEHWCTPEWMCLGM

SEQ ID NO: 2648 - protein, 14 aa, synthetic construct
VVNWCVPEWMCSGF

SEQ ID NO: 2649 - protein, 14 aa, synthetic construct
TVKWCIPSWMCQQS

SEQ ID NO: 2650 - protein, 14 aa, synthetic construct
EFIRCLPPWMCAGF

SEQ ID NO: 2651 - protein, 14 aa, synthetic construct
ASNWCIPTWMCEGS

SEQ ID NO: 2652 - protein, 14 aa, synthetic construct
EPKWCTPAWMCSIV

SEQ ID NO: 2653 - protein, 14 aa, synthetic construct
MVKLCIPEWMCDRQ

SEQ ID NO: 2654 - protein, 14 aa, synthetic construct
WYKWCTPAWMCEIS

SEQ ID NO: 2655 - protein, 14 aa, synthetic construct
EGISCVPNWMCVGF

SEQ ID NO: 2656 - protein, 14 aa, synthetic construct
LVHMCKPAWMCTNL

SEQ ID NO: 2657 - protein, 14 aa, synthetic construct
GEIWCTPSWMCWGL

SEQ ID NO: 2658 - protein, 14 aa, synthetic construct
ELMWCIPPWMCEHS

SEQ ID NO: 2659 - protein, 14 aa, synthetic construct
SDTWCIPAWMCEGR

SEQ ID NO: 2660 - protein, 14 aa, synthetic construct
LMNWCTPAWMCTGF

SEQ ID NO: 2661 - protein, 14 aa, synthetic construct
FDMLCNPKWMCEGF

SEQ ID NO: 2662 - protein, 14 aa, synthetic construct
WDRLCIPPWMCDVM

SEQ ID NO: 2663 - protein, 14 aa, synthetic construct
SENWCIPNWMCSGL

SEQ ID NO: 2664 - protein, 14 aa, synthetic construct
MEKWCTPSWMCQWM

SEQ ID NO: 2665 - protein, 14 aa, synthetic construct
LSNWCVPLWMCEMV

SEQ ID NO: 2666 - protein, 14 aa, synthetic construct
MDRWCIPEWMCARH

SEQ ID NO: 2667 - protein, 14 aa, synthetic construct
PMKWCIPEWMCIAS

SEQ ID NO: 2668 - protein, 14 aa, synthetic construct
IDHWCTPAWMCRGF

SEQ ID NO: 2669 - protein, 14 aa, synthetic construct
SEEWCIPPWMCLGR

SEQ ID NO: 2670 - protein, 14 aa, synthetic construct
NDHWCIPPWMCAPY

SEQ ID NO: 2671 - protein, 14 aa, synthetic construct
FENWCTPSWMCSGF

SEQ ID NO: 2672 - protein, 14 aa, synthetic construct
VPKWCTPTWMCIHM

SEQ ID NO: 2673 - protein, 14 aa, synthetic construct
AERWCIPSWMCELA

SEQ ID NO: 2674 - protein, 14 aa, synthetic construct
PVKWCVPPWMCAAT

SEQ ID NO: 2675 - protein, 14 aa, synthetic construct
AANWCTPPWMCLGF

SEQ ID NO: 2676 - protein, 14 aa, synthetic construct
EEKWCRPAWMCEHA

SEQ ID NO: 2677 - protein, 14 aa, synthetic construct
ITPWCIPPWMCPGP

SEQ ID NO: 2678 - protein, 14 aa, synthetic construct
EEKMCKPSWMCQLF

SEQ ID NO: 2679 - protein, 14 aa, synthetic construct
AERWCIPDWMCNVI

SEQ ID NO: 2680 - protein, 14 aa, synthetic construct
GANLCIPPWMCLSS

SEQ ID NO: 2681 - protein, 14 aa, synthetic construct
AEKLCKPAWMCNNM

SEQ ID NO: 2682 - protein, 14 aa, synthetic construct
INKWCIPEWMCAAM

SEQ ID NO: 2683 - protein, 14 aa, synthetic construct
YEKWCIPAWMCHVA

SEQ ID NO: 2684 - protein, 14 aa, synthetic construct
DGVWCVPQWMCDGY

SEQ ID NO: 2685 - protein, 14 aa, synthetic construct
GLGWCTPTWMCEGF

SEQ ID NO: 2686 - protein, 14 aa, synthetic construct
LEKWCIPSWMCSTL

SEQ ID NO: 2687 - protein, 14 aa, synthetic construct
VDKWCIPSWMCEFY

SEQ ID NO: 2688 - protein, 14 aa, synthetic construct
QVQWCIPPWMCLED

SEQ ID NO: 2689 - protein, 14 aa, synthetic construct
GEKWCIPTWMCDWT

SEQ ID NO: 2690 - protein, 14 aa, synthetic construct
MGNWCIPEWMCWGT

SEQ ID NO: 2691 - protein, 14 aa, synthetic construct
DGKWCIPPWMCAMA

SEQ ID NO: 2692 - protein, 14 aa, synthetic construct
PDKWCIPQWMCDIT

SEQ ID NO: 2693 - protein, 14 aa, synthetic construct
HDKLCIPLWMCDGV

SEQ ID NO: 2694 - protein, 14 aa, synthetic construct
VVKWCIPTWMCQTL

SEQ ID NO: 2695 - protein, 14 aa, synthetic construct
LHKWCTPAWMCEVP

SEQ ID NO: 2696 - protein, 14 aa, synthetic construct
VQKWCIPPWMCQIS

SEQ ID NO: 2697 - protein, 14 aa, synthetic construct
LGIWCIPEWMCVSA

SEQ ID NO: 2698 - protein, 14 aa, synthetic construct
DFMRCTPEWMCTGF

SEQ ID NO: 2699 - protein, 14 aa, synthetic construct
FEHWCTPPWMCFSS

SEQ ID NO: 2700 - protein, 14 aa, synthetic construct
FYKWCTPEWMCTVN

SEQ ID NO: 2701 - protein, 14 aa, synthetic construct
IPKWCTPVWMCAGF

SEQ ID NO: 2702 - protein, 14 aa, synthetic construct
VEKWCKPEWMCTSL

SEQ ID NO: 2703 - protein, 14 aa, synthetic construct
DAKWCIPDWMCYGF

SEQ ID NO: 2704 - protein, 14 aa, synthetic construct
TIKWCTPPWMCIMN

SEQ ID NO: 2705 - protein, 14 aa, synthetic construct
WVKWCTPPWMCEWD

SEQ ID NO: 2706 - protein, 14 aa, synthetic construct
VFHLCMPPWMCSQD

SEQ ID NO: 2707 - protein, 14 aa, synthetic construct
FPKWCTPSWMCDFV

SEQ ID NO: 2708 - protein, 14 aa, synthetic construct
SPKWCTPSWMCELQ

SEQ ID NO: 2709 - protein, 14 aa, synthetic construct
LEKWCRPAWMCNGM

SEQ ID NO: 2710 - protein, 14 aa, synthetic construct
LERWCIPDWMCEWP

SEQ ID NO: 2711 - protein, 14 aa, synthetic construct
ASMWCIPPWMCAED

SEQ ID NO: 2712 - protein, 14 aa, synthetic construct
EVKWCIPEWMCMVV

SEQ ID NO: 2713 - protein, 14 aa, synthetic construct
VVKWCTPAWMCELQ

SEQ ID NO: 2714 - protein, 14 aa, synthetic construct
FGISCTPSWMCEGF

SEQ ID NO: 2715 - protein, 14 aa, synthetic construct
WEKWCTPAWMCAVA

SEQ ID NO: 2716 - protein, 14 aa, synthetic construct
DVRWCTPPWMCVAM

SEQ ID NO: 2717 - protein, 14 aa, synthetic construct
MQHWCVPPWMCQSL

SEQ ID NO: 2718 - protein, 14 aa, synthetic construct
VMKWCTPEWMCQVF

SEQ ID NO: 2719 - protein, 14 aa, synthetic construct
IEKWCIPQWMCGNP

SEQ ID NO: 2720 - protein, 14 aa, synthetic construct
HTTWCTPAWMCQGF

SEQ ID NO: 2721 - protein, 14 aa, synthetic construct
MEKWCIPSWMCVGM

SEQ ID NO: 2722 - protein, 14 aa, synthetic construct
PDKWCIPQWMCSQM

SEQ ID NO: 2723 - protein, 14 aa, synthetic construct
TVKWCVPPWMCSVP

SEQ ID NO: 2724 - protein, 14 aa, synthetic construct
VDHWCTPEWMCVMM

SEQ ID NO: 2725 - protein, 14 aa, synthetic construct
YIKWCTPPWMCELM

SEQ ID NO: 2726 - protein, 14 aa, synthetic construct
MHHWCIPAWMCSTE

SEQ ID NO: 2727 - protein, 14 aa, synthetic construct
QAKWCIPQWMCESY

SEQ ID NO: 2728 - protein, 14 aa, synthetic construct
GEKWCIPDWMCAAA

SEQ ID NO: 2729 - protein, 14 aa, synthetic construct
LDMRCTPAWMCEGF

SEQ ID NO: 2730 - protein, 14 aa, synthetic construct
VEKWCTPPWMCRFD

SEQ ID NO: 2731 - protein, 14 aa, synthetic construct
LWKWCTPPWMCEVS

SEQ ID NO: 2732 - protein, 14 aa, synthetic construct
SERWCIPQWMCTAP

SEQ ID NO: 2733 - protein, 14 aa, synthetic construct
FDPWCIPLWMCEGM

SEQ ID NO: 2734 - protein, 14 aa, synthetic construct
FSKLCIPAWMCSEE

SEQ ID NO: 2735 - protein, 14 aa, synthetic construct
VAKWCIPSWMCETV

SEQ ID NO: 2736 - protein, 14 aa, synthetic construct
EIKWCIPSWMCNTL

SEQ ID NO: 2737 - protein, 14 aa, synthetic construct
EFKWCIPKWMCMVD

SEQ ID NO: 2738 - protein, 14 aa, synthetic construct
WTNTCIPMWMCEGF

SEQ ID NO: 2739 - protein, 14 aa, synthetic construct
LTNWCTPQWMCLGF

SEQ ID NO: 2740 - protein, 14 aa, synthetic construct
LVNWCTPPWMCWHD

SEQ ID NO: 2741 - protein, 14 aa, synthetic construct
DENWCKPLWMCEGF

SEQ ID NO: 2742 - protein, 14 aa, synthetic construct
LWMSCIPPWMCANV

SEQ ID NO: 2743 - protein, 14 aa, synthetic construct
EYKWCVPIWMCAYD

SEQ ID NO: 2744 - protein, 14 aa, synthetic construct
ADRLCIPPWMCEMK

SEQ ID NO: 2745 - protein, 14 aa, synthetic construct
GEKWCIPEWMCVTT

SEQ ID NO: 2746 - protein, 14 aa, synthetic construct
EIKWCTPPWMCTIG

SEQ ID NO: 2747 - protein, 14 aa, synthetic construct
VLKWCTPPWMCWDI

SEQ ID NO: 2748 - protein, 14 aa, synthetic construct
EVKWCIPNWMCAAS

SEQ ID NO: 2749 - protein, 14 aa, synthetic construct
GDNWCKPAWMCRDM

SEQ ID NO: 2750 - protein, 14 aa, synthetic construct
EERWCIPEWMCSRI

SEQ ID NO: 2751 - protein, 14 aa, synthetic construct
GINWCTPSWMCTGF

SEQ ID NO: 2752 - protein, 14 aa, synthetic construct
MPKWCTPSWMCSPS

SEQ ID NO: 2753 - protein, 14 aa, synthetic construct
EMNWCIPAWMCEGR

SEQ ID NO: 2754 - protein, 14 aa, synthetic construct
EAKWCIPNWMCEMA

SEQ ID NO: 2755 - protein, 14 aa, synthetic construct
MPKWCTPSWMCAVQ

SEQ ID NO: 2756 - protein, 14 aa, synthetic construct
PAKWCVPSWMCSEI

SEQ ID NO: 2757 - protein, 14 aa, synthetic construct
VVHWCTPAWMCYDM

SEQ ID NO: 2758 - protein, 14 aa, synthetic construct
LHKLCTPTWMCEGF

SEQ ID NO: 2759 - protein, 14 aa, synthetic construct
GAIWCIPQWMCAWN

SEQ ID NO: 2760 - protein, 14 aa, synthetic construct
EVKWCIPAWMCVED

SEQ ID NO: 2761 - protein, 14 aa, synthetic construct
LERWCIPSWMCTED

SEQ ID NO: 2762 - protein, 14 aa, synthetic construct
YEKWCTPTWMCSWL

SEQ ID NO: 2763 - protein, 14 aa, synthetic construct
IEKWCTPPWMCLDH

SEQ ID NO: 2764 - protein, 14 aa, synthetic construct
ESKWCIPEWMCEQR

SEQ ID NO: 2765 - protein, 14 aa, synthetic construct
EEPWCIPSWMCALT

SEQ ID NO: 2766 - protein, 14 aa, synthetic construct
VVKWCTPPWMCSVW

SEQ ID NO: 2767 - protein, 14 aa, synthetic construct
WDHLCKPRWMCDGI

SEQ ID NO: 2768 - protein, 14 aa, synthetic construct
SVKMCIPEWMCENI

SEQ ID NO: 2769 - protein, 14 aa, synthetic construct
VETWCIPHWMCAGF

SEQ ID NO: 2770 - protein, 14 aa, synthetic construct
PTKLCIPPWMCYPS

SEQ ID NO: 2771 - protein, 14 aa, synthetic construct
SVHECRPLWMCQGF

SEQ ID NO: 2772 - protein, 14 aa, synthetic construct
GEKWCIPSWMCVAV

SEQ ID NO: 2773 - protein, 14 aa, synthetic construct
VEILCKPAWMCRLD

SEQ ID NO: 2774 - protein, 14 aa, synthetic construct
DTNWCRPAWMCAFA

SEQ ID NO: 2775 - protein, 14 aa, synthetic construct
TQMWCIPFWMCEVQ

SEQ ID NO: 2776 - protein, 14 aa, synthetic construct
EMKWCTPPWMCTEL

SEQ ID NO: 2777 - protein, 14 aa, synthetic construct
SVKLCIPDWMCVSE

SEQ ID NO: 2778 - protein, 14 aa, synthetic construct
DEIWCIPRWMCDGI

SEQ ID NO: 2779 - protein, 14 aa, synthetic construct
DGKWCIPEWMCAQQ

SEQ ID NO: 2780 - protein, 14 aa, synthetic construct
PVKLCKPDWMCWVS

SEQ ID NO: 2781 - protein, 14 aa, synthetic construct
VMKWCTPQWMCEHL

SEQ ID NO: 2782 - protein, 14 aa, synthetic construct
VVKWCTPSWMCTGF

SEQ ID NO: 2783 - protein, 14 aa, synthetic construct
GDKWCIPDWMCVQS

SEQ ID NO: 2784 - protein, 14 aa, synthetic construct
FEKWCIPAWMCEQV

SEQ ID NO: 2785 - protein, 14 aa, synthetic construct
VSKWCTPAWMCSAM

SEQ ID NO: 2786 - protein, 14 aa, synthetic construct
VDKLCRPAWMCVAS

SEQ ID NO: 2787 - protein, 14 aa, synthetic construct
MEKWCIPDWMCLGN

SEQ ID NO: 2788 - protein, 14 aa, synthetic construct
FDKWCIPPWMCVGP

SEQ ID NO: 2789 - protein, 14 aa, synthetic construct
PEHWCIPPWMCVVH

SEQ ID NO: 2790 - protein, 14 aa, synthetic construct
DFHMCTPRWMCEGM

SEQ ID NO: 2791 - protein, 14 aa, synthetic construct
EHKWCTPLWMCEGL

SEQ ID NO: 2792 - protein, 14 aa, synthetic construct
YHNWCVPQWMCVGL

SEQ ID NO: 2793 - protein, 14 aa, synthetic construct
VEKWCIPQWMCSMD

SEQ ID NO: 2794 - protein, 14 aa, synthetic construct
EMIRCIPDWMCMSY

SEQ ID NO: 2795 - protein, 14 aa, synthetic construct
GFPMCKPLWMCENL

SEQ ID NO: 2796 - protein, 14 aa, synthetic construct
PFKWCTPAWMCEVH

SEQ ID NO: 2797 - protein, 14 aa, synthetic construct
WSNWCIPPWMCAMN

SEQ ID NO: 2798 - protein, 14 aa, synthetic construct
VVNWCTPAWMCSGF

SEQ ID NO: 2799 - protein, 14 aa, synthetic construct
DSRWCIPDWMCELE

SEQ ID NO: 2800 - protein, 14 aa, synthetic construct
LVRWCVPEWMCAGM

SEQ ID NO: 2801 - protein, 14 aa, synthetic construct
VSPLCKPDWMCNGF

SEQ ID NO: 2802 - protein, 14 aa, synthetic construct
FPHLCIPYWMCVRT

SEQ ID NO: 2803 - protein, 14 aa, synthetic construct
DYKWCTPIWMCAGD

SEQ ID NO: 2804 - protein, 14 aa, synthetic construct
VSIWCIPPWMCVEK

SEQ ID NO: 2805 - protein, 14 aa, synthetic construct
WAKWCTPEWMCVVH

SEQ ID NO: 2806 - protein, 14 aa, synthetic construct
DFKWCTPPWMCDVF

SEQ ID NO: 2807 - protein, 14 aa, synthetic construct
SVKWCTPSWMCEHM

SEQ ID NO: 2808 - protein, 14 aa, synthetic construct
IEKMCIPAWMCTDK

SEQ ID NO: 2809 - protein, 14 aa, synthetic construct
MGNWCTPPWMCTGF

SEQ ID NO: 2810 - protein, 14 aa, synthetic construct
HFKMCVPPWMCLFD

SEQ ID NO: 2811 - protein, 14 aa, synthetic construct
LEKWCIPLWMCQTA

SEQ ID NO: 2812 - protein, 14 aa, synthetic construct
ESRLCIPAWMCESQ

SEQ ID NO: 2813 - protein, 14 aa, synthetic construct
WPKLCTPPWMCTVD

SEQ ID NO: 2814 - protein, 14 aa, synthetic construct
GEHWCIPAWMCEKM

SEQ ID NO: 2815 - protein, 14 aa, synthetic construct
GEKWCIPEWMCQDV

SEQ ID NO: 2816 - protein, 14 aa, synthetic construct
GTNWCKPDWMCVGL

SEQ ID NO: 2817 - protein, 14 aa, synthetic construct
SDKWCIPVWMCEES

SEQ ID NO: 2818 - protein, 14 aa, synthetic construct
EPKMCTPSWMCRGF

SEQ ID NO: 2819 - protein, 14 aa, synthetic construct
SETWCIPAWMCLDG

SEQ ID NO: 2820 - protein, 14 aa, synthetic construct
IPKWCTPSWMCEWV

SEQ ID NO: 2821 - protein, 14 aa, synthetic construct
LGKWCIPDWMCSGL

SEQ ID NO: 2822 - protein, 14 aa, synthetic construct
VQMLCIPAWMCGME

SEQ ID NO: 2823 - protein, 14 aa, synthetic construct
VERLCKPLWMCQER

SEQ ID NO: 2824 - protein, 14 aa, synthetic construct
HPSWCTPAWMCQGF

SEQ ID NO: 2825 - protein, 14 aa, synthetic construct
TYKMCIPAWKCAVS

SEQ ID NO: 2826 - protein, 14 aa, synthetic construct
EVKWCIPDWMCSVI

SEQ ID NO: 2827 - protein, 14 aa, synthetic construct
LVKLCSPEWMCVGM

SEQ ID NO: 2828 - protein, 14 aa, synthetic construct
LGKMCIPLWMCDGL

SEQ ID NO: 2829 - protein, 14 aa, synthetic construct
SLELCRPEWMCVGF

SEQ ID NO: 2830 - protein, 14 aa, synthetic construct
EIKWCTPAWMCAIN

SEQ ID NO: 2831 - protein, 14 aa, synthetic construct
LTQWCIPQWMCEGS

SEQ ID NO: 2832 - protein, 14 aa, synthetic construct
VPKWCTPAWMCTGL

SEQ ID NO: 2833 - protein, 14 aa, synthetic construct
VDNWCTPMWMCAWI

SEQ ID NO: 2834 - protein, 14 aa, synthetic construct
IDPRCIPEWMCIGY

SEQ ID NO: 2835 - protein, 14 aa, synthetic construct
VPIWCTPEWMCSGF

SEQ ID NO: 2836 - protein, 14 aa, synthetic construct
PIPLCIPLWMCEER

SEQ ID NO: 2837 - protein, 14 aa, synthetic construct
DNKWCIPEWMCFAS

SEQ ID NO: 2838 - protein, 14 aa, synthetic construct
HERSCIPAWMCWRQ

SEQ ID NO: 2839 - protein, 14 aa, synthetic construct
IVRWCTPEWMCVGF

SEQ ID NO: 2840 - protein, 14 aa, synthetic construct
AVKWCTPAWMCSGF

SEQ ID NO: 2841 - protein, 14 aa, synthetic construct
VITWCTPPWMCSGW

SEQ ID NO: 2842 - protein, 14 aa, synthetic construct
WEKWCTPSWMCSAG

SEQ ID NO: 2843 - protein, 14 aa, synthetic construct
LGHWCTPPWMCTES

SEQ ID NO: 2844 - protein, 14 aa, synthetic construct
YEKWCTPAWMCDFV

SEQ ID NO: 2845 - protein, 14 aa, synthetic construct
IVKWCTPHWMCSGW

SEQ ID NO: 2846 - protein, 14 aa, synthetic construct
VTHWCIPEWMCVVE

SEQ ID NO: 2847 - protein, 14 aa, synthetic construct
YEKWCIPRWMCEAN

SEQ ID NO: 2848 - protein, 14 aa, synthetic construct
EHRWCIPVWMCEKS

SEQ ID NO: 2849 - protein, 14 aa, synthetic construct
PVPLCRPPWMCQSV

SEQ ID NO: 2850 - protein, 14 aa, synthetic construct
VPKWCIPVWMCEVM

SEQ ID NO: 2851 - protein, 14 aa, synthetic construct
DWKWCTPAWMCSTE

SEQ ID NO: 2852 - protein, 14 aa, synthetic construct
VSPKCIPPWMCSYV

SEQ ID NO: 2853 - protein, 14 aa, synthetic construct
EMKWCIPQWMCADS

SEQ ID NO: 2854 - protein, 14 aa, synthetic construct
EPKWCVPPWMCAYD

SEQ ID NO: 2855 - protein, 14 aa, synthetic construct
LMNWCIPSWMCDVE

SEQ ID NO: 2856 - protein, 14 aa, synthetic construct
EMKWCTPEWMCIGL

SEQ ID NO: 2857 - protein, 14 aa, synthetic construct
PTKWCIPEWMCVES

SEQ ID NO: 2858 - protein, 14 aa, synthetic construct
DLKWCFPDWMCQVG

SEQ ID NO: 2859 - protein, 14 aa, synthetic construct
SEHWCIPQWMCQSV

SEQ ID NO: 2860 - protein, 14 aa, synthetic construct
PLKWCIPQWMCTEA

SEQ ID NO: 2861 - protein, 14 aa, synthetic construct
LYNWCTPAWMCYGY

SEQ ID NO: 2862 - protein, 14 aa, synthetic construct
ESHWCIPAWMCEQF

SEQ ID NO: 2863 - protein, 14 aa, synthetic construct
EGKWCIPDWMCAAH

SEQ ID NO: 2864 - protein, 14 aa, synthetic construct
FENWCTPKWMCIGV

SEQ ID NO: 2865 - protein, 14 aa, synthetic construct
VQKWCIPPWMCTHI

SEQ ID NO: 2866 - protein, 14 aa, synthetic construct
FHEWCIPSWMCFKE

SEQ ID NO: 2867 - protein, 14 aa, synthetic construct
EPKWCTPPWMCQSV

SEQ ID NO: 2868 - protein, 14 aa, synthetic construct
AEYWCIPRWMCSQH

SEQ ID NO: 2869 - protein, 14 aa, synthetic construct
GEKACIPAWMCSEN

SEQ ID NO: 2870 - protein, 14 aa, synthetic construct
MFKWCTPQWMCETM

SEQ ID NO: 2871 - protein, 14 aa, synthetic construct
TQKLCIPEWMCEAM

SEQ ID NO: 2872 - protein, 14 aa, synthetic construct
LQTWCIPPWMCEGG

SEQ ID NO: 2873 - protein, 14 aa, synthetic construct
VLKWCTPAWMCTGF

SEQ ID NO: 2874 - protein, 14 aa, synthetic construct
WENWCTPTWMCWPN

SEQ ID NO: 2875 - protein, 14 aa, synthetic construct
WDKWCTPPWMCQVH

SEQ ID NO: 2876 - protein, 14 aa, synthetic construct
GVMWCIPQWMCVTA

SEQ ID NO: 2877 - protein, 14 aa, synthetic construct
YAPWCIPLWMCLDR

SEQ ID NO: 2878 - protein, 14 aa, synthetic construct
IAKLCTPAWMCERH

SEQ ID NO: 2879 - protein, 14 aa, synthetic construct
NWKWCIPEWMCAAE

SEQ ID NO: 2880 - protein, 14 aa, synthetic construct
SEIWCIPAWMCQST

SEQ ID NO: 2881 - protein, 14 aa, synthetic construct
VEKWCIPEWMCWTV

SEQ ID NO: 2882 - protein, 14 aa, synthetic construct
VDPWCKPAWMCLGM

SEQ ID NO: 2883 - protein, 14 aa, synthetic construct
EPKWCTPPWMCENF

SEQ ID NO: 2884 - protein, 14 aa, synthetic construct
YDVLCKPDWMCNWN

SEQ ID NO: 2885 - protein, 14 aa, synthetic construct
AIHWCTPPWMCEPQ

SEQ ID NO: 2886 - protein, 14 aa, synthetic construct
EGPWCIPEWMCQNS

SEQ ID NO: 2887 - protein, 14 aa, synthetic construct
IAKWCIPSWMCAGI

SEQ ID NO: 2888 - protein, 14 aa, synthetic construct
QYNWCVPAWMCEIS

SEQ ID NO: 2889 - protein, 14 aa, synthetic construct
VDTWCTPPWMCWGL

SEQ ID NO: 2890 - protein, 14 aa, synthetic construct
TFKWCTPAWMCAGF

SEQ ID NO: 2891 - protein, 14 aa, synthetic construct
EFKWCTPEWMCAMA

SEQ ID NO: 2892 - protein, 14 aa, synthetic construct
QEKMCIPAWMCSEY

SEQ ID NO: 2893 - protein, 14 aa, synthetic construct
LTNWCTPSWMCYGL

SEQ ID NO: 2894 - protein, 14 aa, synthetic construct
LQEWCIPPWMCIKS

SEQ ID NO: 2895 - protein, 14 aa, synthetic construct
GPKWCTPPWMCWEF

SEQ ID NO: 2896 - protein, 14 aa, synthetic construct
GVKWCTPAWMCEWT

SEQ ID NO: 2897 - protein, 14 aa, synthetic construct
SEKWCIPEWMCMYA

SEQ ID NO: 2898 - protein, 14 aa, synthetic construct
EGKWCIPEWMCISV

SEQ ID NO: 2899 - protein, 14 aa, synthetic construct
EVMWCRPAWMCDGI

SEQ ID NO: 2900 - protein, 14 aa, synthetic construct
VVKWCKPAWMCEQA

SEQ ID NO: 2901 - protein, 14 aa, synthetic construct
DLKRCIPDWMCAVA

SEQ ID NO: 2902 - protein, 14 aa, synthetic construct
ETQMCVPQWMCWGI

SEQ ID NO: 2903 - protein, 14 aa, synthetic construct
VGKWCVPMWMCATD

SEQ ID NO: 2904 - protein, 14 aa, synthetic construct
MIGWCTPSWMCSGF

SEQ ID NO: 2905 - protein, 14 aa, synthetic construct
VLNWCTPPWMCLGI

SEQ ID NO: 2906 - protein, 14 aa, synthetic construct
MPRWCTPAWMCEAI

SEQ ID NO: 2907 - protein, 14 aa, synthetic construct
TDKWCVPEWMCMEF

SEQ ID NO: 2908 - protein, 14 aa, synthetic construct
HFNWCTPSWMCDVL

SEQ ID NO: 2909 - protein, 14 aa, synthetic construct
DGIWCTPRWMCEGM

SEQ ID NO: 2910 - protein, 14 aa, synthetic construct
HPQLCIPSWMCNVW

SEQ ID NO: 2911 - protein, 14 aa, synthetic construct
MVKWCTPPWMCNFE

SEQ ID NO: 2912 - protein, 14 aa, synthetic construct
MFKWCTPSWMCERV

SEQ ID NO: 2913 - protein, 14 aa, synthetic construct
VHKWCTPAWMCEVH

SEQ ID NO: 2914 - protein, 14 aa, synthetic construct
LVKWCVPDWMCQET

SEQ ID NO: 2915 - protein, 14 aa, synthetic construct
LSKWCIPDWMCISS

SEQ ID NO: 2916 - protein, 14 aa, synthetic construct
SVTWCIPPWMCELS

SEQ ID NO: 2917 - protein, 14 aa, synthetic construct
IEKWCMPSWMCEWN

SEQ ID NO: 2918 - protein, 14 aa, synthetic construct
ETKLCKPMWMCALL

SEQ ID NO: 2919 - protein, 14 aa, synthetic construct
GMKWCTPEWMCQIV

SEQ ID NO: 2920 - protein, 14 aa, synthetic construct
VWQLCIPPWMCQFE

SEQ ID NO: 2921 - protein, 14 aa, synthetic construct
VMKWCTPSWMCEHI

SEQ ID NO: 2922 - protein, 14 aa, synthetic construct
VDKWCIPAWMCDRS

SEQ ID NO: 2923 - protein, 14 aa, synthetic construct
QMKLCIPQWMCVDH

SEQ ID NO: 2924 - protein, 14 aa, synthetic construct
LHKLCIPEWMCEYY

SEQ ID NO: 2925 - protein, 14 aa, synthetic construct
MVKWCTPAWMCTLE

SEQ ID NO: 2926 - protein, 14 aa, synthetic construct
SSMLCIPPWMCEQS

SEQ ID NO: 2927 - protein, 14 aa, synthetic construct
VEKWCIPEWMCETS

SEQ ID NO: 2928 - protein, 14 aa, synthetic construct
FANWCTPSWMCVGM

SEQ ID NO: 2929 - protein, 14 aa, synthetic construct
MYNLCTPEWMCAGF

SEQ ID NO: 2930 - protein, 14 aa, synthetic construct
HVNWCTPKWMCSGF

SEQ ID NO: 2931 - protein, 14 aa, synthetic construct
HEKWCIPPWMCEAN

SEQ ID NO: 2932 - protein, 14 aa, synthetic construct
QDNWCIPRWMCEAM

SEQ ID NO: 2933 - protein, 14 aa, synthetic construct
YTPWCKPAWMCSVS

SEQ ID NO: 2934 - protein, 14 aa, synthetic construct
AFKWCIPNWMCASQ

SEQ ID NO: 2935 - protein, 14 aa, synthetic construct
MNKWCTPAWMCEVV

SEQ ID NO: 2936 - protein, 14 aa, synthetic construct
IANWCTPQWMCDGF

SEQ ID NO: 2937 - protein, 14 aa, synthetic construct
VPKWCTPDWMCYGM

SEQ ID NO: 2938 - protein, 14 aa, synthetic construct
FHMWCTPAWMCADQ

SEQ ID NO: 2939 - protein, 14 aa, synthetic construct
TPKWCTPPWMCQHG

SEQ ID NO: 2940 - protein, 14 aa, synthetic construct
MTQWCIPEWMCSEE

SEQ ID NO: 2941 - protein, 14 aa, synthetic construct
PETRCIPSWMCSGM

SEQ ID NO: 2942 - protein, 14 aa, synthetic construct
VEMLCKPAWMCANQ

SEQ ID NO: 2943 - protein, 14 aa, synthetic construct
WEKWCTPSGMCDAR

SEQ ID NO: 2944 - protein, 14 aa, synthetic construct
LNNWCTPLWMCQMF

SEQ ID NO: 2945 - protein, 14 aa, synthetic construct
VVPRCTPPWMCLVS

SEQ ID NO: 2946 - protein, 14 aa, synthetic construct
VTKLCIPEWMCASD

SEQ ID NO: 2947 - protein, 14 aa, synthetic construct
VMSWCVPAWMCETP

SEQ ID NO: 2948 - protein, 14 aa, synthetic construct
AEKWCIPEWMCEQL

SEQ ID NO: 2949 - protein, 14 aa, synthetic construct
THHWCIPAWMCEQD

SEQ ID NO: 2950 - protein, 14 aa, synthetic construct
TDKLCRPPWMCELM

SEQ ID NO: 2951 - protein, 14 aa, synthetic construct
DMKWCTPAWMCQSS

SEQ ID NO: 2952 - protein, 14 aa, synthetic construct
DDRWCIPTWMCFLD

SEQ ID NO: 2953 - protein, 14 aa, synthetic construct
TVKWCTPPWMCEES

SEQ ID NO: 2954 - protein, 14 aa, synthetic construct
WAKWCTPVWMCQGI

SEQ ID NO: 2955 - protein, 14 aa, synthetic construct
VGNWCTPMWMCQAF

SEQ ID NO: 2956 - protein, 14 aa, synthetic construct
VPKWCTPEWMCIIH

SEQ ID NO: 2957 - protein, 14 aa, synthetic construct
AEKLCIPDWMCDVY

SEQ ID NO: 2958 - protein, 14 aa, synthetic construct
DLKWCIPSWMCTST

SEQ ID NO: 2959 - protein, 14 aa, synthetic construct
VEKLCKPAWMCNGQ

SEQ ID NO: 2960 - protein, 14 aa, synthetic construct
PERMCVPQWMCTVT

SEQ ID NO: 2961 - protein, 14 aa, synthetic construct
FPKWCTPEWMCSLT

SEQ ID NO: 2962 - protein, 14 aa, synthetic construct
QPKWCTPDWMCTGI

SEQ ID NO: 2963 - protein, 14 aa, synthetic construct
LVKWCIPDWMCSLS

SEQ ID NO: 2964 - protein, 14 aa, synthetic construct
EYKWCTPIWMCQGN

SEQ ID NO: 2965 - protein, 14 aa, synthetic construct
TWKWCTPAWMCSVM

SEQ ID NO: 2966 - protein, 14 aa, synthetic construct
DVKWCIPPWMCPSF

SEQ ID NO: 2967 - protein, 14 aa, synthetic construct
LQNWCVPAWMCELM

SEQ ID NO: 2968 - protein, 14 aa, synthetic construct
SNHLCTPPWMCYGF

SEQ ID NO: 2969 - protein, 14 aa, synthetic construct
ETKWCIPVWMCEHK

SEQ ID NO: 2970 - protein, 14 aa, synthetic construct
HEKWCTPPWMCELI

SEQ ID NO: 2971 - protein, 14 aa, synthetic construct
FVNMCKPAWMCSLL

SEQ ID NO: 2972 - protein, 14 aa, synthetic construct
AIKWCIPAWMCAQA

SEQ ID NO: 2973 - protein, 14 aa, synthetic construct
LQKWCIPAWMCSST

SEQ ID NO: 2974 - protein, 14 aa, synthetic construct
MPKWCTPQWMCEMY

SEQ ID NO: 2975 - protein, 14 aa, synthetic construct
GEHWCTPAWMCSVM

SEQ ID NO: 2976 - protein, 14 aa, synthetic construct
VEKWCRPSWMCQQV

SEQ ID NO: 2977 - protein, 14 aa, synthetic construct
APKWCTPSWMCQQV

SEQ ID NO: 2978 - protein, 14 aa, synthetic construct
DYKWCTPPWMCLVD

SEQ ID NO: 2979 - protein, 14 aa, synthetic construct
VVKWCTPAWMCSLN

SEQ ID NO: 2980 - protein, 14 aa, synthetic construct
APHLCIPKWMCNPS

SEQ ID NO: 2981 - protein, 14 aa, synthetic construct
EFKWCIPMWMCQAN

SEQ ID NO: 2982 - protein, 14 aa, synthetic construct
PPKWCIPAWMCAGM

SEQ ID NO: 2983 - protein, 14 aa, synthetic construct
VTNWCIPEWMCNGN

SEQ ID NO: 2984 - protein, 14 aa, synthetic construct
ITKLCTPPWMCMDV

SEQ ID NO: 2985 - protein, 14 aa, synthetic construct
EEKWCIPYWMCEAV

SEQ ID NO: 2986 - protein, 14 aa, synthetic construct
AGKLCIPNWMCEEQ

SEQ ID NO: 2987 - protein, 14 aa, synthetic construct
WDNWCTPSWMCSEL

SEQ ID NO: 2988 - protein, 14 aa, synthetic construct
QEKWCIPEWMCSVR

SEQ ID NO: 2989 - protein, 14 aa, synthetic construct
DWKWCTPAWMCTQT

SEQ ID NO: 2990 - protein, 14 aa, synthetic construct
LDMLCIPAWMCEPR

SEQ ID NO: 2991 - protein, 14 aa, synthetic construct
EHKWCIPDWMCWED

SEQ ID NO: 2992 - protein, 14 aa, synthetic construct
IAKWCTPPWMCADN

SEQ ID NO: 2993 - protein, 14 aa, synthetic construct
SGNWCTPSWMCTGF

SEQ ID NO: 2994 - protein, 14 aa, synthetic construct
NVIRCEPMWMCYPS

SEQ ID NO: 2995 - protein, 14 aa, synthetic construct
AGHWCIPMWMCQED

SEQ ID NO: 2996 - protein, 14 aa, synthetic construct
DMNWCSPPWMCFGF

SEQ ID NO: 2997 - protein, 14 aa, synthetic construct
GEKWCTPPWMCMFQ

SEQ ID NO: 2998 - protein, 14 aa, synthetic construct
DVKWCIPSWMCQDV

SEQ ID NO: 2999 - protein, 14 aa, synthetic construct
EYAWCIPEWMCGWI

SEQ ID NO: 3000 - protein, 14 aa, synthetic construct
SEAWCIPSWMCRGD

SEQ ID NO: 3001 - protein, 14 aa, synthetic construct
PMKLCSPPWMCFYD

SEQ ID NO: 3002 - protein, 14 aa, synthetic construct
QNIRCVPPWMCENL

SEQ ID NO: 3003 - protein, 14 aa, synthetic construct
VHYWCIPAWMCNKS

SEQ ID NO: 3004 - protein, 14 aa, synthetic construct
EAHLCKPLWMCEFG

SEQ ID NO: 3005 - protein, 14 aa, synthetic construct
IKPLCSPPWMCSMY

SEQ ID NO: 3006 - protein, 14 aa, synthetic construct
LVKWCTPTWMCVGM

SEQ ID NO: 3007 - protein, 14 aa, synthetic construct
IVKWCTPPWMCERP

SEQ ID NO: 3008 - protein, 14 aa, synthetic construct
MEKWCIPQWMCEQF

SEQ ID NO: 3009 - protein, 14 aa, synthetic construct
MGNWCTPSWMCEGL

SEQ ID NO: 3010 - protein, 14 aa, synthetic construct
GEKWCTPLWMCEWY

SEQ ID NO: 3011 - protein, 14 aa, synthetic construct
HWRMCVPTWMCHLD

SEQ ID NO: 3012 - protein, 14 aa, synthetic construct
EEMWCIPVWMCEHQ

SEQ ID NO: 3013 - protein, 14 aa, synthetic construct
FVKWCTPSWMCESQ

SEQ ID NO: 3014 - protein, 14 aa, synthetic construct
DNKMCIPVWMCERF

SEQ ID NO: 3015 - protein, 14 aa, synthetic construct
GSHWCEPLWMCSAF

SEQ ID NO: 3016 - protein, 14 aa, synthetic construct
IEKWCTPPWMCESS

SEQ ID NO: 3017 - protein, 14 aa, synthetic construct
DNMLCRPSWMCEGL

SEQ ID NO: 3018 - protein, 14 aa, synthetic construct
QVPWCTPAWMCERA

SEQ ID NO: 3019 - protein, 14 aa, synthetic construct
TIKWCTPSWMCAEI

SEQ ID NO: 3020 - protein, 14 aa, synthetic construct
VGNWCIPLWMCAAE

SEQ ID NO: 3021 - protein, 14 aa, synthetic construct
EQMWCTPAWMCTGF

SEQ ID NO: 3022 - protein, 14 aa, synthetic construct
DYKWCTPPWMCYSA

SEQ ID NO: 3023 - protein, 14 aa, synthetic construct
DHKWCTPPWMCAAD

SEQ ID NO: 3024 - protein, 14 aa, synthetic construct
MDRWCTPAWMCEVH

SEQ ID NO: 3025 - protein, 14 aa, synthetic construct
PDNWCIPAWMCERF

SEQ ID NO: 3026 - protein, 14 aa, synthetic construct
SVKWCTPPWMCTGL

SEQ ID NO: 3027 - protein, 14 aa, synthetic construct
NVSMCIPNWMCVGL

SEQ ID NO: 3028 - protein, 14 aa, synthetic construct
WENWCRPSWMCEDT

SEQ ID NO: 3029 - protein, 14 aa, synthetic construct
NTHWCTPSWMCSAW

SEQ ID NO: 3030 - protein, 14 aa, synthetic construct
HEKWCVPSWMCDDW

SEQ ID NO: 3031 - protein, 14 aa, synthetic construct
VYKWCTPSWMCADP

SEQ ID NO: 3032 - protein, 14 aa, synthetic construct
VANWCTPKWMCEHV

SEQ ID NO: 3033 - protein, 14 aa, synthetic construct
EYTWCKPAWMCDGV

SEQ ID NO: 3034 - protein, 14 aa, synthetic construct
TQKWCIPAWMCAER

SEQ ID NO: 3035 - protein, 14 aa, synthetic construct
DMHWCTPQWMCAPL

SEQ ID NO: 3036 - protein, 14 aa, synthetic construct
DWKWCTPSWMCAQK

SEQ ID NO: 3037 - protein, 14 aa, synthetic construct
NVKWCVPHWMCEVS

SEQ ID NO: 3038 - protein, 14 aa, synthetic construct
DQKWCIPLWMCETR

SEQ ID NO: 3039 - protein, 14 aa, synthetic construct
DYKWCTPMWMCEVV

SEQ ID NO: 3040 - protein, 14 aa, synthetic construct
EWKWCTPPWMCTTN

SEQ ID NO: 3041 - protein, 14 aa, synthetic construct
MEKMCTPQWMCDMW

SEQ ID NO: 3042 - protein, 14 aa, synthetic construct
INKWCTPAWMCDLS

SEQ ID NO: 3043 - protein, 14 aa, synthetic construct
WQKWCTPMWMCEAT

SEQ ID NO: 3044 - protein, 14 aa, synthetic construct
VNPSCTPSWMCLGL

SEQ ID NO: 3045 - protein, 14 aa, synthetic construct
LYNRCTPAWMCTGF

SEQ ID NO: 3046 - protein, 14 aa, synthetic construct
EMKWCKPEWMCPWM

SEQ ID NO: 3047 - protein, 14 aa, synthetic construct
VSNWCKPAWMCGTT

SEQ ID NO: 3048 - protein, 14 aa, synthetic construct
WEKWCTPPWMCHDM

SEQ ID NO: 3049 - protein, 14 aa, synthetic construct
DIKWCTPSWMCPAK

SEQ ID NO: 3050 - protein, 14 aa, synthetic construct
QMPLCIPQWMCTNN

SEQ ID NO: 3051 - protein, 14 aa, synthetic construct
HGKLCTPSWMCNGF

SEQ ID NO: 3052 - protein, 14 aa, synthetic construct
IVKWCTPAWMCDQQ

SEQ ID NO: 3053 - protein, 14 aa, synthetic construct
TNNWCIPSWMCDIR

SEQ ID NO: 3054 - protein, 14 aa, synthetic construct
WEKLCRPAWMCAAY

SEQ ID NO: 3055 - protein, 14 aa, synthetic construct
FENWCTPYWMCSGM

SEQ ID NO: 3056 - protein, 14 aa, synthetic construct
GNSWCTPQWMCTGF

SEQ ID NO: 3057 - protein, 14 aa, synthetic construct
MSKWCVPTWMCQWQ

SEQ ID NO: 3058 - protein, 14 aa, synthetic construct
DIKRCTPAWMCSWM

SEQ ID NO: 3059 - protein, 14 aa, synthetic construct
IMKWCTPTWMCEMG

SEQ ID NO: 3060 - protein, 14 aa, synthetic construct
FDKWCTPPWMCKVF

SEQ ID NO: 3061 - protein, 14 aa, synthetic construct
TNKLCIPTWMCSGF

SEQ ID NO: 3062 - protein, 14 aa, synthetic construct
VVKMCKPLWMCGIS

SEQ ID NO: 3063 - protein, 14 aa, synthetic construct
SEKWCTPAWMCGDM

SEQ ID NO: 3064 - protein, 14 aa, synthetic construct
DWKWCIPAWMCSQD

SEQ ID NO: 3065 - protein, 14 aa, synthetic construct
GNLWCSPPWMCFGM

SEQ ID NO: 3066 - protein, 14 aa, synthetic construct
DVKWCKPRWMCNRD

SEQ ID NO: 3067 - protein, 14 aa, synthetic construct
EDIWCIPSWMCGVI

SEQ ID NO: 3068 - protein, 14 aa, synthetic construct
ETSWCRPTWMCEGM

SEQ ID NO: 3069 - protein, 14 aa, synthetic construct
ANHWCIPSWMCTEV

SEQ ID NO: 3070 - protein, 14 aa, synthetic construct
APQWCIPPWMCHDQ

SEQ ID NO: 3071 - protein, 14 aa, synthetic construct
DPKWCTPSWMCDWR

SEQ ID NO: 3072 - protein, 14 aa, synthetic construct
AHNWCTPAWMCMWD

SEQ ID NO: 3073 - protein, 14 aa, synthetic construct
GEIRCSPAWMCDGF

SEQ ID NO: 3074 - protein, 14 aa, synthetic construct
MVHWCTPSWMCSAL

SEQ ID NO: 3075 - protein, 14 aa, synthetic construct
MQKMCIPTWMCDGL

SEQ ID NO: 3076 - protein, 14 aa, synthetic construct
PVKMCTPAWMCSER

SEQ ID NO: 3077 - protein, 14 aa, synthetic construct
PWKWCTPVWMCQGV

SEQ ID NO: 3078 - protein, 14 aa, synthetic construct
WINWCTPQWMCADL

SEQ ID NO: 3079 - protein, 14 aa, synthetic construct
FEKWCTPTWMCWPY

SEQ ID NO: 3080 - protein, 14 aa, synthetic construct
ENHWCRPMWMCETI

SEQ ID NO: 3081 - protein, 14 aa, synthetic construct
HAIWCIPEWMCAFN

SEQ ID NO: 3082 - protein, 14 aa, synthetic construct
VEKWCTPAWMCSTS

SEQ ID NO: 3083 - protein, 14 aa, synthetic construct
DVTWCIPPWMCMYN

SEQ ID NO: 3084 - protein, 14 aa, synthetic construct
AENWCTPRWMCEGI

SEQ ID NO: 3085 - protein, 14 aa, synthetic construct
SYKWCTPDWMCVAV

SEQ ID NO: 3086 - protein, 14 aa, synthetic construct
QIKWCIPMWMCEGE

SEQ ID NO: 3087 - protein, 14 aa, synthetic construct
QMHWCMPPWMCEGI

SEQ ID NO: 3088 - protein, 14 aa, synthetic construct
VQAWCVPQWMCNQF

SEQ ID NO: 3089 - protein, 14 aa, synthetic construct
VPKWCTPSWMCASN

SEQ ID NO: 3090 - protein, 14 aa, synthetic construct
SMKMCTPPWMCEFA

SEQ ID NO: 3091 - protein, 14 aa, synthetic construct
DLKWCVPTWMCNWS

SEQ ID NO: 3092 - protein, 14 aa, synthetic construct
GPKWCTPTWMCEFS

SEQ ID NO: 3093 - protein, 14 aa, synthetic construct
GSNWCKPAWMCSVA

SEQ ID NO: 3094 - protein, 14 aa, synthetic construct
QDKWCTPTWMCEGL

SEQ ID NO: 3095 - protein, 14 aa, synthetic construct
DQNWCIPHWMCVGI

SEQ ID NO: 3096 - protein, 14 aa, synthetic construct
VLNWCTPPWMCSGI

SEQ ID NO: 3097 - protein, 14 aa, synthetic construct
GWNWCVPQWMCTTS

SEQ ID NO: 3098 - protein, 14 aa, synthetic construct
QDKMCRPDWMCMNQ

SEQ ID NO: 3099 - protein, 14 aa, synthetic construct
VHKMCTPPWMCVTQ

SEQ ID NO: 3100 - protein, 14 aa, synthetic construct
DMKLCRPAWMCMHN

SEQ ID NO: 3101 - protein, 14 aa, synthetic construct
DVKWCTPPWMCLSD

SEQ ID NO: 3102 - protein, 14 aa, synthetic construct
EENWCIPVWMCERL

SEQ ID NO: 3103 - protein, 14 aa, synthetic construct
LWKSCTPEWMCAEW

SEQ ID NO: 3104 - protein, 14 aa, synthetic construct
SVKWCTPSWMCTEW

SEQ ID NO: 3105 - protein, 14 aa, synthetic construct
VGKWCTPEWMCSGF

SEQ ID NO: 3106 - protein, 14 aa, synthetic construct
VMKWCTPSWMCAEA

SEQ ID NO: 3107 - protein, 14 aa, synthetic construct
WEKWCTPSWMCSGI

SEQ ID NO: 3108 - protein, 14 aa, synthetic construct
TQHWCTPIWMCEGL

SEQ ID NO: 3109 - protein, 14 aa, synthetic construct
VTNWCTPPWMCEML

SEQ ID NO: 3110 - protein, 14 aa, synthetic construct
TEKWCIPQWMCVRT

SEQ ID NO: 3111 - protein, 14 aa, synthetic construct
FEKWCTPQWMCNSM

SEQ ID NO: 3112 - protein, 14 aa, synthetic construct
LNNWCTPAWMCVGY

SEQ ID NO: 3113 - protein, 14 aa, synthetic construct
ERIWCTPKWMCETF

SEQ ID NO: 3114 - protein, 14 aa, synthetic construct
HFKWCIPPWMCLEI

SEQ ID NO: 3115 - protein, 14 aa, synthetic construct
ESKWCVPTWMCAEN

SEQ ID NO: 3116 - protein, 14 aa, synthetic construct
DYKWCTPPWMCDSR

SEQ ID NO: 3117 - protein, 14 aa, synthetic construct
SDNWCKPEWMCVGH

SEQ ID NO: 3118 - protein, 14 aa, synthetic construct
TPKWCTPAWMCVVS

SEQ ID NO: 3119 - protein, 14 aa, synthetic construct
VKHVCMPEWMCYWS

SEQ ID NO: 3120 - protein, 14 aa, synthetic construct
EGKWCTPTWMCQGF

SEQ ID NO: 3121 - protein, 14 aa, synthetic construct
MMHWCTPPWMCEFS

SEQ ID NO: 3122 - protein, 14 aa, synthetic construct
GATWCTPTWMCTGF

SEQ ID NO: 3123 - protein, 14 aa, synthetic construct
WENWCIPQWMCGTA

SEQ ID NO: 3124 - protein, 14 aa, synthetic construct
MEKWCTPRWMCVGM

SEQ ID NO: 3125 - protein, 14 aa, synthetic construct
VTKLCIPEWMCVIQ

SEQ ID NO: 3126 - protein, 14 aa, synthetic construct
MDIWCKPRWMCEEY

SEQ ID NO: 3127 - protein, 14 aa, synthetic construct
VPKWCTPSWMCEFT

SEQ ID NO: 3128 - protein, 14 aa, synthetic construct
VGPWCIPDWMCDVV

SEQ ID NO: 3129 - protein, 14 aa, synthetic construct
FSKLCTPPWMCSVS

SEQ ID NO: 3130 - protein, 14 aa, synthetic construct
PMKWCTPPWMCSYS

SEQ ID NO: 3131 - protein, 14 aa, synthetic construct
IDKWCVPAWMCSPA

SEQ ID NO: 3132 - protein, 14 aa, synthetic construct
GDKWCKPSWMCDFF

SEQ ID NO: 3133 - protein, 14 aa, synthetic construct
EAKWCTPPWMCSLV

SEQ ID NO: 3134 - protein, 14 aa, synthetic construct
SVHMCKPPWMCQSM

SEQ ID NO: 3135 - protein, 14 aa, synthetic construct
IDKWCKPVWMCADN

SEQ ID NO: 3136 - protein, 14 aa, synthetic construct
FEKWCTPLWMCADS

SEQ ID NO: 3137 - protein, 14 aa, synthetic construct
WDNWCTPSWMCSTA

SEQ ID NO: 3138 - protein, 14 aa, synthetic construct
DIRWCTPPWMCMHL

SEQ ID NO: 3139 - protein, 14 aa, synthetic construct
GVNWCVPPWMCLND

SEQ ID NO: 3140 - protein, 14 aa, synthetic construct
GLPWCVPQWMCVVS

SEQ ID NO: 3141 - protein, 14 aa, synthetic construct
YHKWCTPEWMCVFD

SEQ ID NO: 3142 - protein, 14 aa, synthetic construct
SSNWCTPAWMCVTS

SEQ ID NO: 3143 - protein, 14 aa, synthetic construct
LEKWCIPSQLCQLD

SEQ ID NO: 3144 - protein, 14 aa, synthetic construct
GEKWCSPAWMCEWL

SEQ ID NO: 3145 - protein, 14 aa, synthetic construct
DVKWCTPRWMCELS

SEQ ID NO: 3146 - protein, 14 aa, synthetic construct
QAIWCIPDWMCVQN

SEQ ID NO: 3147 - protein, 14 aa, synthetic construct
AFPSCIPEWMCSGM

SEQ ID NO: 3148 - protein, 14 aa, synthetic construct
EFKWCSPAQLCVNG

SEQ ID NO: 3149 - protein, 14 aa, synthetic construct
EVKWCTPYWMCIDT

SEQ ID NO: 3150 - protein, 14 aa, synthetic construct
NTNWCTPPWMCEGL

SEQ ID NO: 3151 - protein, 14 aa, synthetic construct
VAKLCTPAWMCSAM

SEQ ID NO: 3152 - protein, 14 aa, synthetic construct
DWKLCKPTWMCESL

SEQ ID NO: 3153 - protein, 14 aa, synthetic construct
VDRWCTPPWMCDWQ

SEQ ID NO: 3154 - protein, 14 aa, synthetic construct
HPKLCTPEWMCVIQ

SEQ ID NO: 3155 - protein, 14 aa, synthetic construct
DSHWCMPVWMCMGL

SEQ ID NO: 3156 - protein, 14 aa, synthetic construct
EPQWCIPKWMCDHM

SEQ ID NO: 3157 - protein, 14 aa, synthetic construct
ESIRCTPAWMCVEM

SEQ ID NO: 3158 - protein, 14 aa, synthetic construct
PEVMCRPVWMCLGF

SEQ ID NO: 3159 - protein, 14 aa, synthetic construct
MLPICKPDWMCAGF

SEQ ID NO: 3160 - protein, 14 aa, synthetic construct
VVAMCKPAWMCAGL

SEQ ID NO: 3161 - protein, 14 aa, synthetic construct
WDMLCRPAWMCEGF

SEQ ID NO: 3162 - protein, 14 aa, synthetic construct
WEVRCVPEWMCVGF

SEQ ID NO: 3163 - protein, 14 aa, synthetic construct
WMPRCVPEWMCAGF

SEQ ID NO: 3164 - protein, 14 aa, synthetic construct
VMTVCKPAWMCTGF

SEQ ID NO: 3165 - protein, 14 aa, synthetic construct
VFPICKPSWMCVGM

SEQ ID NO: 3166 - protein, 14 aa, synthetic construct
VNIRCEPAWMCMGF

SEQ ID NO: 3167 - protein, 14 aa, synthetic construct
DMRLCVPEWMCLGL

SEQ ID NO: 3168 - protein, 14 aa, synthetic construct
VMPLCKPAWMCGGF

SEQ ID NO: 3169 - protein, 14 aa, synthetic construct
MLPLCVPAWMCSGF

SEQ ID NO: 3170 - protein, 14 aa, synthetic construct
VHIMCKPAWMCLGF

SEQ ID NO: 3171 - protein, 14 aa, synthetic construct
WEMKCIPEWMCRGF

SEQ ID NO: 3172 - protein, 14 aa, synthetic construct
VQRMCEPSWMCFGF

SEQ ID NO: 3173 - protein, 14 aa, synthetic construct
LERACVPSWMCTGF

SEQ ID NO: 3174 - protein, 14 aa, synthetic construct
TQAMCKPAWMCQGF

SEQ ID NO: 3175 - protein, 14 aa, synthetic construct
WEFVCKPEWMCTGF

SEQ ID NO: 3176 - protein, 14 aa, synthetic construct
EWILCKPAWMCDGL

SEQ ID NO: 3177 - protein, 14 aa, synthetic construct
WDRLCIPAWMCSGF

SEQ ID NO: 3178 - protein, 14 aa, synthetic construct
TGAYCVPQWMCSGF

SEQ ID NO: 3179 - protein, 14 aa, synthetic construct
FNVMCRPAWMCDFL

SEQ ID NO: 3180 - protein, 14 aa, synthetic construct
IETWCVPRWMCEGF

SEQ ID NO: 3181 - protein, 14 aa, synthetic construct
MSPLCKPVWMCAGF

SEQ ID NO: 3182 - protein, 14 aa, synthetic construct
TSPACVPSWMCVGF

SEQ ID NO: 3183 - protein, 14 aa, synthetic construct
VLPMCSPPWMCIGL

SEQ ID NO: 3184 - protein, 14 aa, synthetic construct
EPIRCVPQWMCVGF

SEQ ID NO: 3185 - protein, 14 aa, synthetic construct
WPQLCVPMWMCAGL

SEQ ID NO: 3186 - protein, 14 aa, synthetic construct
SEFWCVPAWMCEGF

SEQ ID NO: 3187 - protein, 14 aa, synthetic construct
LERVCKPLWMCTGL

SEQ ID NO: 3188 - protein, 14 aa, synthetic construct
IDILCRPLWMCNGM

SEQ ID NO: 3189 - protein, 14 aa, synthetic construct
IIRHCVPMWMCQGF

SEQ ID NO: 3190 - protein, 14 aa, synthetic construct
ETLRCEPMWMCMGF

SEQ ID NO: 3191 - protein, 14 aa, synthetic construct
SMPRCVPVWMCEGF

SEQ ID NO: 3192 - protein, 14 aa, synthetic construct
DDIRCKPAWMCMGF

SEQ ID NO: 3193 - protein, 14 aa, synthetic construct
TLSMCVPTWMCTGF

SEQ ID NO: 3194 - protein, 14 aa, synthetic construct
ESARCVPMWMCNGF

SEQ ID NO: 3195 - protein, 14 aa, synthetic construct
VTVICKPQWMCVGF

SEQ ID NO: 3196 - protein, 14 aa, synthetic construct
MHLMCKPAWMCAGF

SEQ ID NO: 3197 - protein, 14 aa, synthetic construct
GDPVCKPTWMCLGF

SEQ ID NO: 3198 - protein, 14 aa, synthetic construct
PERMCIPSWMCEVL

SEQ ID NO: 3199 - protein, 14 aa, synthetic construct
WDAKCVPRWMCDGF

SEQ ID NO: 3200 - protein, 14 aa, synthetic construct
EFMRCTPPWMCLGF

SEQ ID NO: 3201 - protein, 14 aa, synthetic construct
NPPYCVPAWMCAGF

SEQ ID NO: 3202 - protein, 14 aa, synthetic construct
DGIKCVPRWMCDGF

SEQ ID NO: 3203 - protein, 14 aa, synthetic construct
SLPLCKPLWMCEGF

SEQ ID NO: 3204 - protein, 14 aa, synthetic construct
VSKVCKPAWMCEGL

SEQ ID NO: 3205 - protein, 14 aa, synthetic construct
MASLCVPSWMCTGF

SEQ ID NO: 3206 - protein, 14 aa, synthetic construct
QEVYCKPAWMCDGF

SEQ ID NO: 3207 - protein, 14 aa, synthetic construct
EAHICRPLWMCTGF

SEQ ID NO: 3208 - protein, 14 aa, synthetic construct
ETPFCIPQWMCDGF

SEQ ID NO: 3209 - protein, 14 aa, synthetic construct
ALPQCVPAWMCLGF

SEQ ID NO: 3210 - protein, 14 aa, synthetic construct
VLKMCEPLWMCVGF

SEQ ID NO: 3211 - protein, 14 aa, synthetic construct
QALMCVPEWMCLGF

SEQ ID NO: 3212 - protein, 14 aa, synthetic construct
IERMCRPAWMCDGF

SEQ ID NO: 3213 - protein, 14 aa, synthetic construct
HDKLCRPAWMCNGF

SEQ ID NO: 3214 - protein, 14 aa, synthetic construct
NWPVCKPMWMCTGF

SEQ ID NO: 3215 - protein, 14 aa, synthetic construct
MEIRCTPPWMCMGF

SEQ ID NO: 3216 - protein, 14 aa, synthetic construct
PWLMCKPAWMCTGF

SEQ ID NO: 3217 - protein, 14 aa, synthetic construct
VTPKCVPMWMCAGF

SEQ ID NO: 3218 - protein, 14 aa, synthetic construct
QTVMCRPAWMCVGF

SEQ ID NO: 3219 - protein, 14 aa, synthetic construct
VTPACVPTWMCYGF

SEQ ID NO: 3220 - protein, 14 aa, synthetic construct
VFPACVPNWMCVGF

SEQ ID NO: 3221 - protein, 14 aa, synthetic construct
PSHYCVPAWMCAGF

SEQ ID NO: 3222 - protein, 14 aa, synthetic construct
VEPSCVPYWMCLGF

SEQ ID NO: 3223 - protein, 14 aa, synthetic construct
AEMRCIPEWMCSGF

SEQ ID NO: 3224 - protein, 14 aa, synthetic construct
LGLACIPEWMCVGF

SEQ ID NO: 3225 - protein, 14 aa, synthetic construct
GEPVCKPAWMCEGF

SEQ ID NO: 3226 - protein, 14 aa, synthetic construct
AVPLCMPKWMCTGF

SEQ ID NO: 3227 - protein, 14 aa, synthetic construct
EKPVCVPSWMCTGF

SEQ ID NO: 3228 - protein, 14 aa, synthetic construct
AVHYCQPSWMCTGF

SEQ ID NO: 3229 - protein, 14 aa, synthetic construct
GERWCTPPWMCVGL

SEQ ID NO: 3230 - protein, 14 aa, synthetic construct
GLALCKPEWMCIGF

SEQ ID NO: 3231 - protein, 14 aa, synthetic construct
GGLLCKPAWMCNWL

SEQ ID NO: 3232 - protein, 14 aa, synthetic construct
VDRMCVPKWMCEGL

SEQ ID NO: 3233 - protein, 14 aa, synthetic construct
LDVLCKPTWMCMGF

SEQ ID NO: 3234 - protein, 14 aa, synthetic construct
LPRICVPEWMCLGF

SEQ ID NO: 3235 - protein, 14 aa, synthetic construct
VDPMCIPRWMCSFL

SEQ ID NO: 3236 - protein, 14 aa, synthetic construct
LAIMCRPAWMCSGF

SEQ ID NO: 3237 - protein, 14 aa, synthetic construct
ISHMCKPVWMCSGL

SEQ ID NO: 3238 - protein, 14 aa, synthetic construct
VWPRCEPQWMCAGF

SEQ ID NO: 3239 - protein, 14 aa, synthetic construct
VPKMCTPPWMCWGF

SEQ ID NO: 3240 - protein, 14 aa, synthetic construct
VGKMCVPEWMCHGF

SEQ ID NO: 3241 - protein, 14 aa, synthetic construct
TPIFCVPAWMCSGF

SEQ ID NO: 3242 - protein, 14 aa, synthetic construct
VDRMCKPTWMCEGF

SEQ ID NO: 3243 - protein, 14 aa, synthetic construct
IKPFCVPEWMCVAL

SEQ ID NO: 3244 - protein, 14 aa, synthetic construct
IVPACKPVWMCDGF

SEQ ID NO: 3245 - protein, 14 aa, synthetic construct
NIPHCVPAWMCIGF

SEQ ID NO: 3246 - protein, 14 aa, synthetic construct
TQALCVPSWMCDGF

SEQ ID NO: 3247 - protein, 14 aa, synthetic construct
VEQMCKPEWMCKGF

SEQ ID NO: 3248 - protein, 14 aa, synthetic construct
MHMLCRPAWMCSGF

SEQ ID NO: 3249 - protein, 14 aa, synthetic construct
VERACVPVWMCEGF

SEQ ID NO: 3250 - protein, 14 aa, synthetic construct
EFNWCRPLWMCVGF

SEQ ID NO: 3251 - protein, 14 aa, synthetic construct
IHPVCKPDWMCAGF

SEQ ID NO: 3252 - protein, 14 aa, synthetic construct
IDPMCKPLWMCAGF

SEQ ID NO: 3253 - protein, 14 aa, synthetic construct
VFPMCKPAWMCLGF

SEQ ID NO: 3254 - protein, 14 aa, synthetic construct
HVPKCVPQWMCIGF

SEQ ID NO: 3255 - protein, 14 aa, synthetic construct
ISALCVPDWMCYGF

SEQ ID NO: 3256 - protein, 14 aa, synthetic construct
FDKICVPTWMCTGF

SEQ ID NO: 3257 - protein, 14 aa, synthetic construct
DVRMCKPSWMCIGL

SEQ ID NO: 3258 - protein, 14 aa, synthetic construct
ELILCQPRWMCEGF

SEQ ID NO: 3259 - protein, 14 aa, synthetic construct
EGIYCRPAWMCEGF

SEQ ID NO: 3260 - protein, 14 aa, synthetic construct
LTPMCKPSWMCDGF

SEQ ID NO: 3261 - protein, 14 aa, synthetic construct
TVIKCIPAWMCDGF

SEQ ID NO: 3262 - protein, 14 aa, synthetic construct
EMRMCTPPWMCWGF

SEQ ID NO: 3263 - protein, 14 aa, synthetic construct
GDHLCRPSWMCVGF

SEQ ID NO: 3264 - protein, 14 aa, synthetic construct
FPHMCKPEWMCAGF

SEQ ID NO: 3265 - protein, 14 aa, synthetic construct
WDHLCKPDWMCLGF

SEQ ID NO: 3266 - protein, 14 aa, synthetic construct
SSPICKPMWMCTGF

SEQ ID NO: 3267 - protein, 14 aa, synthetic construct
ENIMCEPMWMCIGF

SEQ ID NO: 3268 - protein, 14 aa, synthetic construct
IMPKCEPIWMCAGF

SEQ ID NO: 3269 - protein, 14 aa, synthetic construct
VDIQCKPLWMCIGM

SEQ ID NO: 3270 - protein, 14 aa, synthetic construct
TLMRCEPSWMCQGF

SEQ ID NO: 3271 - protein, 14 aa, synthetic construct
TTAYCIPPWMCSGF

SEQ ID NO: 3272 - protein, 14 aa, synthetic construct
YLQFCKPVWMCTGF

SEQ ID NO: 3273 - protein, 14 aa, synthetic construct
AYEMCIPAWMCEGF

SEQ ID NO: 3274 - protein, 14 aa, synthetic construct
EQPLCTPQWMCWGF

SEQ ID NO: 3275 - protein, 14 aa, synthetic construct
PEFVCKPSWMCQGF

SEQ ID NO: 3276 - protein, 14 aa, synthetic construct
WEQRCVPEWMCVGF

SEQ ID NO: 3277 - protein, 14 aa, synthetic construct
ADPVCRPQWMCEGF

SEQ ID NO: 3278 - protein, 14 aa, synthetic construct
VQSLCVPYWMCTGF

SEQ ID NO: 3279 - protein, 14 aa, synthetic construct
NLPLCKPAWMCKWL

SEQ ID NO: 3280 - protein, 14 aa, synthetic construct
PGPLCVPEWMCIGF

SEQ ID NO: 3281 - protein, 14 aa, synthetic construct
LFKMCQPSWMCDGF

SEQ ID NO: 3282 - protein, 14 aa, synthetic construct
QTPVCIPEWMCTGF

SEQ ID NO: 3283 - protein, 14 aa, synthetic construct
GERYCVPAWMCAGL

SEQ ID NO: 3284 - protein, 14 aa, synthetic construct
WEAMCQPLWMCTGF

SEQ ID NO: 3285 - protein, 14 aa, synthetic construct
LDIWCVPAWMCHGF

SEQ ID NO: 3286 - protein, 14 aa, synthetic construct
VYPLCKPSWMCSGL

SEQ ID NO: 3287 - protein, 14 aa, synthetic construct
DIPICRPQWMCIGF

SEQ ID NO: 3288 - protein, 14 aa, synthetic construct
GDVYCKPAWMCDGF

SEQ ID NO: 3289 - protein, 14 aa, synthetic construct
VSPLCVPSWMCVGF

SEQ ID NO: 3290 - protein, 14 aa, synthetic construct
VGAACIPDWMCVGF

SEQ ID NO: 3291 - protein, 14 aa, synthetic construct
GVPMCVPDWMCHGL

SEQ ID NO: 3292 - protein, 14 aa, synthetic construct
FEMLCKPAWMCSGF

SEQ ID NO: 3293 - protein, 14 aa, synthetic construct
TELRCVPSWMCTGF

SEQ ID NO: 3294 - protein, 14 aa, synthetic construct
FGYACIPNWMCTVF

SEQ ID NO: 3295 - protein, 14 aa, synthetic construct
SEIACRPAWMCQWL

SEQ ID NO: 3296 - protein, 14 aa, synthetic construct
VEHWCRPEWMCAGF

SEQ ID NO: 3297 - protein, 14 aa, synthetic construct
DDRMCIPSWMCSGL

SEQ ID NO: 3298 - protein, 14 aa, synthetic construct
PMHACIPMWMCAGF

SEQ ID NO: 3299 - protein, 14 aa, synthetic construct
PERMCRPLWMCEGF

SEQ ID NO: 3300 - protein, 14 aa, synthetic construct
AGIRCVPEWMCLGF

SEQ ID NO: 3301 - protein, 14 aa, synthetic construct
EEVYCVPKWMCLGF

SEQ ID NO: 3302 - protein, 14 aa, synthetic construct
SQPMCIPVWMCRGF

SEQ ID NO: 3303 - protein, 14 aa, synthetic construct
LLVRCQPEWMCVGF

SEQ ID NO: 3304 - protein, 14 aa, synthetic construct
FTAYCKPAWMCQGL

SEQ ID NO: 3305 - protein, 14 aa, synthetic construct
TVVMCKPSWMCEGF

SEQ ID NO: 3306 - protein, 14 aa, synthetic construct
TTIMCEPTWMCTGF

SEQ ID NO: 3307 - protein, 14 aa, synthetic construct
FHVRCVPEWMCWGF

SEQ ID NO: 3308 - protein, 14 aa, synthetic construct
YEIRCEPKWMCMGF

SEQ ID NO: 3309 - protein, 14 aa, synthetic construct
LAHMCIPAWMCAGL

SEQ ID NO: 3310 - protein, 14 aa, synthetic construct
LQSMCRPAWMCTGF

SEQ ID NO: 3311 - protein, 14 aa, synthetic construct
AIAHCIPQWMCSGF

SEQ ID NO: 3312 - protein, 14 aa, synthetic construct
PEALCMPPWMCHGF

SEQ ID NO: 3313 - protein, 14 aa, synthetic construct
MSPRCVPMWMCDWL

SEQ ID NO: 3314 - protein, 14 aa, synthetic construct
VVAHCVPSWMCTGF

SEQ ID NO: 3315 - protein, 14 aa, synthetic construct
IARMCVPEWMCQEL

SEQ ID NO: 3316 - protein, 14 aa, synthetic construct
EIPVCRPAWMCLGL

SEQ ID NO: 3317 - protein, 14 aa, synthetic construct
MMPLCMPTWMCEGF

SEQ ID NO: 3318 - protein, 14 aa, synthetic construct
YQLLCKPEWMCVGF

SEQ ID NO: 3319 - protein, 14 aa, synthetic construct
MLPWCVPHWMCDGF

SEQ ID NO: 3320 - protein, 14 aa, synthetic construct
VEPMCRPAWMCLGF

SEQ ID NO: 3321 - protein, 14 aa, synthetic construct
ALPMCEPFWMCTGF

SEQ ID NO: 3322 - protein, 14 aa, synthetic construct
VMVECRPAWMCNGF

SEQ ID NO: 3323 - protein, 14 aa, synthetic construct
MYHMCRPSWMCEGF

SEQ ID NO: 3324 - protein, 14 aa, synthetic construct
SEVMCVPQWMCNGF

SEQ ID NO: 3325 - protein, 14 aa, synthetic construct
WWPSCVPEWMCAGL

SEQ ID NO: 3326 - protein, 14 aa, synthetic construct
GMPYCVPEWMCSWL

SEQ ID NO: 3327 - protein, 14 aa, synthetic construct
WEPVCKPDWMCNGF

SEQ ID NO: 3328 - protein, 14 aa, synthetic construct
QWLRCEPEWMCIGF

SEQ ID NO: 3329 - protein, 14 aa, synthetic construct
STMMCVPPWMCMGF

SEQ ID NO: 3330 - protein, 14 aa, synthetic construct
AELLCVPTWMCMGF

SEQ ID NO: 3331 - protein, 14 aa, synthetic construct
PAEWCIPVWMCTGF

SEQ ID NO: 3332 - protein, 14 aa, synthetic construct
ANVACIPPWMCLGF

SEQ ID NO: 3333 - protein, 14 aa, synthetic construct
VQGVCVPSWMCTGF

SEQ ID NO: 3334 - protein, 14 aa, synthetic construct
HEAMCRPTWMCHGF

SEQ ID NO: 3335 - protein, 14 aa, synthetic construct
IESRCVPEWMCYGF

SEQ ID NO: 3336 - protein, 14 aa, synthetic construct
EEKMCTPQWMCSGF

SEQ ID NO: 3337 - protein, 14 aa, synthetic construct
GGLRCEPMWMCHGF

SEQ ID NO: 3338 - protein, 14 aa, synthetic construct
DHLMCKPSWMCKGF

SEQ ID NO: 3339 - protein, 14 aa, synthetic construct
TVPKCVPNWMCDWL

SEQ ID NO: 3340 - protein, 14 aa, synthetic construct
IERLCMPMWMCTGL

SEQ ID NO: 3341 - protein, 14 aa, synthetic construct
PLVVCKPAWMCIGF

SEQ ID NO: 3342 - protein, 14 aa, synthetic construct
VDVLCVPSWMCSWL

SEQ ID NO: 3343 - protein, 14 aa, synthetic construct
VLPVCKPLWMCKGL

SEQ ID NO: 3344 - protein, 14 aa, synthetic construct
DMRRCEPIWMCVGF

SEQ ID NO: 3345 - protein, 14 aa, synthetic construct
DSIMCRPAWMCAGF

SEQ ID NO: 3346 - protein, 14 aa, synthetic construct
HHQLCKPLWMCEGF

SEQ ID NO: 3347 - protein, 14 aa, synthetic construct
WEILCKPEWMCSGF

SEQ ID NO: 3348 - protein, 14 aa, synthetic construct
EGVVCIPEWMCKGF

SEQ ID NO: 3349 - protein, 14 aa, synthetic construct
ELLMCRPAWMCDGF

SEQ ID NO: 3350 - protein, 14 aa, synthetic construct
YAHICKPSWMCDGF

SEQ ID NO: 3351 - protein, 14 aa, synthetic construct
LMPLCVPVWMCSGF

SEQ ID NO: 3352 - protein, 14 aa, synthetic construct
IIPACVPPWMCSGF

SEQ ID NO: 3353 - protein, 14 aa, synthetic construct
PAVRCEPSWMCQGF

SEQ ID NO: 3354 - protein, 14 aa, synthetic construct
VEPQCRPAWMCYGF

SEQ ID NO: 3355 - protein, 14 aa, synthetic construct
VHNWCVPSWMCLGL

SEQ ID NO: 3356 - protein, 14 aa, synthetic construct
DYPLCRPEWMCMGF

SEQ ID NO: 3357 - protein, 14 aa, synthetic construct
EHLRCVPDWMCVGF

SEQ ID NO: 3358 - protein, 14 aa, synthetic construct
YTMVCRPAWMCQGF

SEQ ID NO: 3359 - protein, 14 aa, synthetic construct
PTVYCKPEWMCTGF

SEQ ID NO: 3360 - protein, 14 aa, synthetic construct
SLAVCKPSWMCAGF

SEQ ID NO: 3361 - protein, 14 aa, synthetic construct
VIGWCVPQWMCSGF

SEQ ID NO: 3362 - protein, 14 aa, synthetic construct
VDKVCRPMWMCAGF

SEQ ID NO: 3363 - protein, 14 aa, synthetic construct
VGNMCVPEWMCVGF

SEQ ID NO: 3364 - protein, 14 aa, synthetic construct
PGHVCRPAWMCEGF

SEQ ID NO: 3365 - protein, 14 aa, synthetic construct
VNVKCTPPWMCFGF

SEQ ID NO: 3366 - protein, 14 aa, synthetic construct
ELYKCVPSWMCYGF

SEQ ID NO: 3367 - protein, 14 aa, synthetic construct
PGQVCIPEWMCTGF

SEQ ID NO: 3368 - protein, 14 aa, synthetic construct
DMRLCRPVWMCEGF

SEQ ID NO: 3369 - protein, 14 aa, synthetic construct
VAPSCVPLWMCVGM

SEQ ID NO: 3370 - protein, 14 aa, synthetic construct
DWIRCLPAWMCTGF

SEQ ID NO: 3371 - protein, 14 aa, synthetic construct
PVELCRPAWMCWGF

SEQ ID NO: 3372 - protein, 14 aa, synthetic construct
IEMMCRPSWMCDWL

SEQ ID NO: 3373 - protein, 14 aa, synthetic construct
TGPVCIPKWMCFGF

SEQ ID NO: 3374 - protein, 14 aa, synthetic construct
DWVRCVPEWMCLGF

SEQ ID NO: 3375 - protein, 14 aa, synthetic construct
EFAMCRPVWMCWGF

SEQ ID NO: 3376 - protein, 14 aa, synthetic construct
EEKMCVPLWMCSGF

SEQ ID NO: 3377 - protein, 14 aa, synthetic construct
ITKACIPEWMCHAF

SEQ ID NO: 3378 - protein, 14 aa, synthetic construct
VQVLCVPSWMCHGF

SEQ ID NO: 3379 - protein, 14 aa, synthetic construct
VEIQCRPSWMCMGF

SEQ ID NO: 3380 - protein, 14 aa, synthetic construct
VVPMCSPSWMCQGF

SEQ ID NO: 3381 - protein, 14 aa, synthetic construct
GMVRCVPQWMCVGF

SEQ ID NO: 3382 - protein, 14 aa, synthetic construct
VERSCVPSWMCYGF

SEQ ID NO: 3383 - protein, 14 aa, synthetic construct
LLAECVAAWMCSGF

SEQ ID NO: 3384 - protein, 14 aa, synthetic construct
LSHMCRPAWMCEGF

SEQ ID NO: 3385 - protein, 14 aa, synthetic construct
ISPVCIPSWMCLGL

SEQ ID NO: 3386 - protein, 14 aa, synthetic construct
LEKACVPQWMCYGL

SEQ ID NO: 3387 - protein, 14 aa, synthetic construct
SPYFCIPAWMCHGF

SEQ ID NO: 3388 - protein, 14 aa, synthetic construct
IMMRCEPVWMCEGF

SEQ ID NO: 3389 - protein, 14 aa, synthetic construct
WLMRCEPQWMCAGF

SEQ ID NO: 3390 - protein, 14 aa, synthetic construct
TASWCKPGGACKGF

SEQ ID NO: 3391 - protein, 14 aa, synthetic construct
YEQLCKPLWMCQGF

SEQ ID NO: 3392 - protein, 14 aa, synthetic construct
DEWICRPAWMCQGF

SEQ ID NO: 3393 - protein, 14 aa, synthetic construct
VNHLCKPTWMCAGF

SEQ ID NO: 3394 - protein, 14 aa, synthetic construct
TYMMCVPEWMCQGF

SEQ ID NO: 3395 - protein, 14 aa, synthetic construct
HLMACKPAWMCLGL

SEQ ID NO: 3396 - protein, 14 aa, synthetic construct
EWMKCVPLWMCEGI

SEQ ID NO: 3397 - protein, 14 aa, synthetic construct
TDHLCVPSWMCLGF

SEQ ID NO: 3398 - protein, 14 aa, synthetic construct
DGPLCVPQWMCLWL

SEQ ID NO: 3399 - protein, 14 aa, synthetic construct
GQNLCIPSWMCEGF

SEQ ID NO: 3400 - protein, 14 aa, synthetic construct
LDAMCRPLWMCSGF

SEQ ID NO: 3401 - protein, 14 aa, synthetic construct
LEHMCRPSWMCTGF

SEQ ID NO: 3402 - protein, 14 aa, synthetic construct
FWAQCVPPWMCSGF

SEQ ID NO: 3403 - protein, 14 aa, synthetic construct
VDLICRPAWMCSGF

SEQ ID NO: 3404 - protein, 14 aa, synthetic construct
VVPRCEPMWMCQGF

SEQ ID NO: 3405 - protein, 14 aa, synthetic construct
TDQLCKPLWMCTGF

SEQ ID NO: 3406 - protein, 14 aa, synthetic construct
VSIMCTPLWMCEGF

SEQ ID NO: 3407 - protein, 14 aa, synthetic construct
TELACKPLWMCNGF

SEQ ID NO: 3408 - protein, 14 aa, synthetic construct
TGAICVPEWMCMGF

SEQ ID NO: 3409 - protein, 14 aa, synthetic construct
VEPYCKPAWMCTGF

SEQ ID NO: 3410 - protein, 14 aa, synthetic construct
GAMVCKPAWMCQGF

SEQ ID NO: 3411 - protein, 14 aa, synthetic construct
YDFRCIPSWMCMGI

SEQ ID NO: 3412 - protein, 14 aa, synthetic construct
QGRVCEPSWMCTGF

SEQ ID NO: 3413 - protein, 14 aa, synthetic construct
MERMCRPAWMCTAF

SEQ ID NO: 3414 - protein, 14 aa, synthetic construct
EHILCRPVWMCEGF

SEQ ID NO: 3415 - protein, 14 aa, synthetic construct
MGPVCKPAWMCLEF

SEQ ID NO: 3416 - protein, 14 aa, synthetic construct
PMPVCVPMWMCYGF

SEQ ID NO: 3417 - protein, 14 aa, synthetic construct
ILPQCVPAWMCSGF

SEQ ID NO: 3418 - protein, 14 aa, synthetic construct
DFAYCKPEWMCVGF

SEQ ID NO: 3419 - protein, 14 aa, synthetic construct
GEILCRPAWMCYGF

SEQ ID NO: 3420 - protein, 14 aa, synthetic construct
GEVLCRPAWMCSGF

SEQ ID NO: 3421 - protein, 14 aa, synthetic construct
QEIRCEPIWMCWGF

SEQ ID NO: 3422 - protein, 14 aa, synthetic construct
NPMYCKPSWMCEGF

SEQ ID NO: 3423 - protein, 14 aa, synthetic construct
PVAVCKPEWMCIGF

SEQ ID NO: 3424 - protein, 14 aa, synthetic construct
SEVVCVPTWMCTGF

SEQ ID NO: 3425 - protein, 14 aa, synthetic construct
VEAMCKPWWMCEGL

SEQ ID NO: 3426 - protein, 14 aa, synthetic construct
VVQLCRPSWMCQGF

SEQ ID NO: 3427 - protein, 14 aa, synthetic construct
IEIMCMPRWMCDGF

SEQ ID NO: 3428 - protein, 14 aa, synthetic construct
EPQMCIPRWMCDGF

SEQ ID NO: 3429 - protein, 14 aa, synthetic construct
NGVVCQPPWMCFGF

SEQ ID NO: 3430 - protein, 14 aa, synthetic construct
VPRYCVPQWMCAAF

SEQ ID NO: 3431 - protein, 14 aa, synthetic construct
EFPLCVPAWMCSGF

SEQ ID NO: 3432 - protein, 14 aa, synthetic construct
FHIMCQPEWMCLGF

SEQ ID NO: 3433 - protein, 14 aa, synthetic construct
SGALCVPLWMCTGF

SEQ ID NO: 3434 - protein, 14 aa, synthetic construct
LESMCIPPWMCSGL

SEQ ID NO: 3435 - protein, 14 aa, synthetic construct
DYHYCEPAWMCFGF

SEQ ID NO: 3436 - protein, 14 aa, synthetic construct
NEPWCVPAWMCTGF

SEQ ID NO: 3437 - protein, 14 aa, synthetic construct
APVFCKPAWMCPWL

SEQ ID NO: 3438 - protein, 14 aa, synthetic construct
GMIQCRPAWMCAGL

SEQ ID NO: 3439 - protein, 14 aa, synthetic construct
GYPLCIPEWMCAGF

SEQ ID NO: 3440 - protein, 14 aa, synthetic construct
SMHWCEPMWMCAGF

SEQ ID NO: 3441 - protein, 14 aa, synthetic construct
VNVKCVPSWMCSGF

SEQ ID NO: 3442 - protein, 14 aa, synthetic construct
FEILCRPLWMCSGF

SEQ ID NO: 3443 - protein, 14 aa, synthetic construct
LDKRCVPVWMCEGF

SEQ ID NO: 3444 - protein, 14 aa, synthetic construct
LELACKPEWMCVGF

SEQ ID NO: 3445 - protein, 14 aa, synthetic construct
GHQMCVPQWMCDAF

SEQ ID NO: 3446 - protein, 14 aa, synthetic construct
SVGYCVPSWMCSGF

SEQ ID NO: 3447 - protein, 14 aa, synthetic construct
DAVRCVPSWMCEGF

SEQ ID NO: 3448 - protein, 14 aa, synthetic construct
THIICKPAWMCDAW

SEQ ID NO: 3449 - protein, 14 aa, synthetic construct
YERSCVPSWMCEGF

SEQ ID NO: 3450 - protein, 14 aa, synthetic construct
AERLCVPAWMCLNL

SEQ ID NO: 3451 - protein, 14 aa, synthetic construct
HQLMCRPAWMCEGF

SEQ ID NO: 3452 - protein, 14 aa, synthetic construct
VVQICKPSWMCEGF

SEQ ID NO: 3453 - protein, 14 aa, synthetic construct
IVPKCQPSWMCFGF

SEQ ID NO: 3454 - protein, 14 aa, synthetic construct
DTRICKPEWMCMGM

SEQ ID NO: 3455 - protein, 14 aa, synthetic construct
TAPVCVPWWMCEGF

SEQ ID NO: 3456 - protein, 14 aa, synthetic construct
IDTICRPSWMCLGF

SEQ ID NO: 3457 - protein, 14 aa, synthetic construct
YERVCEPLWMCTGF

SEQ ID NO: 3458 - protein, 14 aa, synthetic construct
AGVYCTPMWMCTGF

SEQ ID NO: 3459 - protein, 14 aa, synthetic construct
SVPLCIPEWMCVGF

SEQ ID NO: 3460 - protein, 14 aa, synthetic construct
HLPRCEPAWMCHGF

SEQ ID NO: 3461 - protein, 14 aa, synthetic construct
IERSCTPSWMCHGF

SEQ ID NO: 3462 - protein, 14 aa, synthetic construct
GPIMCQPRWMCEGF

SEQ ID NO: 3463 - protein, 14 aa, synthetic construct
FEMFCIPAWMCSGL

SEQ ID NO: 3464 - protein, 14 aa, synthetic construct
AEYMCIPSWMCHGM

SEQ ID NO: 3465 - protein, 14 aa, synthetic construct
LLPACKPTWMCTGL

SEQ ID NO: 3466 - protein, 14 aa, synthetic construct
DAPLCKPQWMCSGF

SEQ ID NO: 3467 - protein, 14 aa, synthetic construct
FPRLCEPLWMCKGF

SEQ ID NO: 3468 - protein, 14 aa, synthetic construct
WDQWCVPKWMCQGF

SEQ ID NO: 3469 - protein, 14 aa, synthetic construct
DMSLCKPPWMCFGF

SEQ ID NO: 3470 - protein, 14 aa, synthetic construct
PWIVCKPAWMCTGF

SEQ ID NO: 3471 - protein, 14 aa, synthetic construct
VSSMCKPAWMCSGF

SEQ ID NO: 3472 - protein, 14 aa, synthetic construct
IQVMCRPAWMCSGF

SEQ ID NO: 3473 - protein, 14 aa, synthetic construct
QMPMCRPAWMCMGF

SEQ ID NO: 3474 - protein, 14 aa, synthetic construct
IVPYCMPQWMCSGF

SEQ ID NO: 3475 - protein, 14 aa, synthetic construct
WMAMCKPVWMCEGF

SEQ ID NO: 3476 - protein, 14 aa, synthetic construct
LALRCEPSWMCLGF

SEQ ID NO: 3477 - protein, 14 aa, synthetic construct
NHVQCVPNWMCSGF

SEQ ID NO: 3478 - protein, 14 aa, synthetic construct
ETALCRPLWMCDWL

SEQ ID NO: 3479 - protein, 14 aa, synthetic construct
DIHLCTPNWMCSGF

SEQ ID NO: 3480 - protein, 14 aa, synthetic construct
MDKICSPMWMCLGF

SEQ ID NO: 3481 - protein, 14 aa, synthetic construct
NVHYCVPAWMCNGF

SEQ ID NO: 3482 - protein, 14 aa, synthetic construct
LVRVCTPMWMCQGF

SEQ ID NO: 3483 - protein, 14 aa, synthetic construct
TYPKCIPPWMCTGF

SEQ ID NO: 3484 - protein, 14 aa, synthetic construct
ADWLCRPAWMCEGL

SEQ ID NO: 3485 - protein, 14 aa, synthetic construct
VEKLCKPEWMCMGF

SEQ ID NO: 3486 - protein, 14 aa, synthetic construct
EVKFCKPAWMCTGF

SEQ ID NO: 3487 - protein, 14 aa, synthetic construct
GEVFCIPAWMCAGF

SEQ ID NO: 3488 - protein, 14 aa, synthetic construct
ANLLCIPNWMCSGF

SEQ ID NO: 3489 - protein, 14 aa, synthetic construct
MDRMCVPEWMCYVF

SEQ ID NO: 3490 - protein, 14 aa, synthetic construct
VTAKCVPEWMCTGF

SEQ ID NO: 3491 - protein, 14 aa, synthetic construct
YPSMCKPLWMCQGF

SEQ ID NO: 3492 - protein, 14 aa, synthetic construct
VTRMCVPEWMCSGI

SEQ ID NO: 3493 - protein, 14 aa, synthetic construct
YEPVCRPAWMCIGF

SEQ ID NO: 3494 - protein, 14 aa, synthetic construct
YEQACQPPWMCLGF

SEQ ID NO: 3495 - protein, 14 aa, synthetic construct
YMMICRPAWMCSGL

SEQ ID NO: 3496 - protein, 14 aa, synthetic construct
HERECIPRWMCTGF

SEQ ID NO: 3497 - protein, 14 aa, synthetic construct
GVSMCIPAWMCQGF

SEQ ID NO: 3498 - protein, 14 aa, synthetic construct
IQILCTPTWMCVGF

SEQ ID NO: 3499 - protein, 14 aa, synthetic construct
EGAICKPEWMCKGF

SEQ ID NO: 3500 - protein, 14 aa, synthetic construct
MVRLCEPEWMCTGF

SEQ ID NO: 3501 - protein, 14 aa, synthetic construct
IEKWCFPMWMCEGF

SEQ ID NO: 3502 - protein, 14 aa, synthetic construct
VSELCRPAWMCHGF

SEQ ID NO: 3503 - protein, 14 aa, synthetic construct
AAPMCIPAWMCHGF

SEQ ID NO: 3504 - protein, 14 aa, synthetic construct
DMRVCKPEWMCTGL

SEQ ID NO: 3505 - protein, 14 aa, synthetic construct
LEALCVPRWMCEGF

SEQ ID NO: 3506 - protein, 14 aa, synthetic construct
ADLRCVPEWMCMGI

SEQ ID NO: 3507 - protein, 14 aa, synthetic construct
QHWQCVPRWMCDGF

SEQ ID NO: 3508 - protein, 14 aa, synthetic construct
EVVMCRPLWMCSGF

SEQ ID NO: 3509 - protein, 14 aa, synthetic construct
GEAVCIPRWMCDGF

SEQ ID NO: 3510 - protein, 14 aa, synthetic construct
DMPLCIPAWMCAGF

SEQ ID NO: 3511 - protein, 14 aa, synthetic construct
HEHFCRPLWMCTGL

SEQ ID NO: 3512 - protein, 14 aa, synthetic construct
VEVRCVPAWMCTGF

SEQ ID NO: 3513 - protein, 14 aa, synthetic construct
LSPMCVPQWMCSGF

SEQ ID NO: 3514 - protein, 14 aa, synthetic construct
FDRVCKPEWMCNGL

SEQ ID NO: 3515 - protein, 14 aa, synthetic construct
VTVRCEPAWMCMGF

SEQ ID NO: 3516 - protein, 14 aa, synthetic construct
VTPLCVPKWMCELF

SEQ ID NO: 3517 - protein, 14 aa, synthetic construct
VVPLCIPQWMCAVF

SEQ ID NO: 3518 - protein, 14 aa, synthetic construct
VVVSCIPTWMCVGF

SEQ ID NO: 3519 - protein, 14 aa, synthetic construct
VSVRCEPEWMCMGF

SEQ ID NO: 3520 - protein, 14 aa, synthetic construct
LERLCQPSWMCTGF

SEQ ID NO: 3521 - protein, 14 aa, synthetic construct
VVKICQPDWMCWGF

SEQ ID NO: 3522 - protein, 14 aa, synthetic construct
TVVKCVPEWMCEWL

SEQ ID NO: 3523 - protein, 14 aa, synthetic construct
HDPACVPSWMCFGF

SEQ ID NO: 3524 - protein, 14 aa, synthetic construct
PFAYCVPQWMCEAF

SEQ ID NO: 3525 - protein, 14 aa, synthetic construct
DHHICRPAWMCMGL

SEQ ID NO: 3526 - protein, 14 aa, synthetic construct
DTPKCIPQWMCVGF

SEQ ID NO: 3527 - protein, 14 aa, synthetic construct
PEAMCRPTWMCAGF

SEQ ID NO: 3528 - protein, 14 aa, synthetic construct
TVPLCKPLWMCYGF

SEQ ID NO: 3529 - protein, 14 aa, synthetic construct
AIAMCVPSWMCTGL

SEQ ID NO: 3530 - protein, 14 aa, synthetic construct
MAPYCVPSWMCWGF

SEQ ID NO: 3531 - protein, 14 aa, synthetic construct
LDLRCQPPWMCMGF

SEQ ID NO: 3532 - protein, 14 aa, synthetic construct
VEPLCVPSWMCQGI

SEQ ID NO: 3533 - protein, 14 aa, synthetic construct
IELFCKPAWMCDGF

SEQ ID NO: 3534 - protein, 14 aa, synthetic construct
DVHLCKPSWMCAGF

SEQ ID NO: 3535 - protein, 14 aa, synthetic construct
DQVMCKPIWMCEGF

SEQ ID NO: 3536 - protein, 14 aa, synthetic construct
IPRACIPAWMCQGF

SEQ ID NO: 3537 - protein, 14 aa, synthetic construct
LQILCKPQWMCEGL

SEQ ID NO: 3538 - protein, 14 aa, synthetic construct
MELKCVPKWMCAGF

SEQ ID NO: 3539 - protein, 14 aa, synthetic construct
PQWMCKPEWMCNGF

SEQ ID NO: 3540 - protein, 14 aa, synthetic construct
ITALCKPAWMCDGF

SEQ ID NO: 3541 - protein, 14 aa, synthetic construct
GEVLCRPIWMCNGF

SEQ ID NO: 3542 - protein, 14 aa, synthetic construct
LTVLCEPAWMCVGF

SEQ ID NO: 3543 - protein, 14 aa, synthetic construct
PIVKCSPAWMCSGF

SEQ ID NO: 3544 - protein, 14 aa, synthetic construct
VGHVCLPPWMCTGF

SEQ ID NO: 3545 - protein, 14 aa, synthetic construct
ITPLCSPAWMCQGL

SEQ ID NO: 3546 - protein, 14 aa, synthetic construct
LGIYCVPEWMCQGF

SEQ ID NO: 3547 - protein, 14 aa, synthetic construct
VTAYCVPPWMCAVF

SEQ ID NO: 3548 - protein, 14 aa, synthetic construct
IVKACKPEWMCVGF

SEQ ID NO: 3549 - protein, 14 aa, synthetic construct
PYAMCEPAWMCSGF

SEQ ID NO: 3550 - protein, 14 aa, synthetic construct
DGIRCVPNWMCVGF

SEQ ID NO: 3551 - protein, 14 aa, synthetic construct
VERLCMPEWMCLGF

SEQ ID NO: 3552 - protein, 14 aa, synthetic construct
PLPMCVPAWMCAGF

SEQ ID NO: 3553 - protein, 14 aa, synthetic construct
EYHKCIPEWMCAGF

SEQ ID NO: 3554 - protein, 14 aa, synthetic construct
WEHRCTPEWMCTGF

SEQ ID NO: 3555 - protein, 14 aa, synthetic construct
DSVLCVPSWMCHGF

SEQ ID NO: 3556 - protein, 14 aa, synthetic construct
GFRICEPEWMCVGF

SEQ ID NO: 3557 - protein, 14 aa, synthetic construct
MVERCIPVWMCEGF

SEQ ID NO: 3558 - protein, 14 aa, synthetic construct
ETSMCRPSWMCEGF

SEQ ID NO: 3559 - protein, 14 aa, synthetic construct
VNVRCEPSWMCTGL

SEQ ID NO: 3560 - protein, 14 aa, synthetic construct
LSAMCVPPWMCTGF

SEQ ID NO: 3561 - protein, 14 aa, synthetic construct
NILRCEPMWMCTGF

SEQ ID NO: 3562 - protein, 14 aa, synthetic construct
QDIVCRPSWMCHGF

SEQ ID NO: 3563 - protein, 14 aa, synthetic construct
GLALCKPAWMCQGF

SEQ ID NO: 3564 - protein, 14 aa, synthetic construct
VTHSCVPAWMCVGL

SEQ ID NO: 3565 - protein, 14 aa, synthetic construct
MMHNCIPYWMCAGF

SEQ ID NO: 3566 - protein, 14 aa, synthetic construct
NVPVCIPDWMCVGF

SEQ ID NO: 3567 - protein, 14 aa, synthetic construct
GVIACKPHWMCTGF

SEQ ID NO: 3568 - protein, 14 aa, synthetic construct
MPMHCVPSWMCEGF

SEQ ID NO: 3569 - protein, 14 aa, synthetic construct
SIPKCMPEWMCIGL

SEQ ID NO: 3570 - protein, 14 aa, synthetic construct
YGALCVPAWMCSGF

SEQ ID NO: 3571 - protein, 14 aa, synthetic construct
IVPWCKPAWMCAVS

SEQ ID NO: 3572 - protein, 14 aa, synthetic construct
DGFICRPEWMCQWL

SEQ ID NO: 3573 - protein, 14 aa, synthetic construct
LGNLCVPPWMCQGF

SEQ ID NO: 3574 - protein, 14 aa, synthetic construct
QPGYCVPQWMCMGF

SEQ ID NO: 3575 - protein, 14 aa, synthetic construct
AEMRCIPQWMCSGL

SEQ ID NO: 3576 - protein, 14 aa, synthetic construct
ENVRCEPMWMCKGF

SEQ ID NO: 3577 - protein, 14 aa, synthetic construct
PTPVCKPGWMCDLF

SEQ ID NO: 3578 - protein, 14 aa, synthetic construct
VSIVCVPEWMCSGF

SEQ ID NO: 3579 - protein, 14 aa, synthetic construct
FFKMCIPEWMCSGF

SEQ ID NO: 3580 - protein, 14 aa, synthetic construct
EENFCVPKWMCEGF

SEQ ID NO: 3581 - protein, 14 aa, synthetic construct
EIMLCKPEWMCYGF

SEQ ID NO: 3582 - protein, 14 aa, synthetic construct
EYQVCKPTWMCTGF

SEQ ID NO: 3583 - protein, 14 aa, synthetic construct
LPYMCTPIWMCIGF

SEQ ID NO: 3584 - protein, 14 aa, synthetic construct
VEVKCVPEWMCTGF

SEQ ID NO: 3585 - protein, 14 aa, synthetic construct
ISPRCEPLWMCTGL

SEQ ID NO: 3586 - protein, 14 aa, synthetic construct
LDPMCVPSWMCWGF

SEQ ID NO: 3587 - protein, 14 aa, synthetic construct
GGVLCQPAWMCIGF

SEQ ID NO: 3588 - protein, 14 aa, synthetic construct
INAWCIPAWMCEGF

SEQ ID NO: 3589 - protein, 14 aa, synthetic construct
SMGLCKPPWMCAGF

SEQ ID NO: 3590 - protein, 14 aa, synthetic construct
MVVRCEPEWMCIGF

SEQ ID NO: 3591 - protein, 14 aa, synthetic construct
FDRICKPAWMCIEF

SEQ ID NO: 3592 - protein, 14 aa, synthetic construct
EFQMCVPEWMCTGL

SEQ ID NO: 3593 - protein, 14 aa, synthetic construct
PARMCVPAWMCSVL

SEQ ID NO: 3594 - protein, 14 aa, synthetic construct
LPPMCIPQWMCMHF

SEQ ID NO: 3595 - protein, 14 aa, synthetic construct
GEPWCIPSWMCQGF

SEQ ID NO: 3596 - protein, 14 aa, synthetic construct
WNHVCIPTWMCTGM

SEQ ID NO: 3597 - protein, 14 aa, synthetic construct
VERMCKPEWMCFGF

SEQ ID NO: 3598 - protein, 14 aa, synthetic construct
MEHWCVPAWMCSGF

SEQ ID NO: 3599 - protein, 14 aa, synthetic construct
FDHLCIPVWMCKGF

SEQ ID NO: 3600 - protein, 14 aa, synthetic construct
ELQRCIPQWMCVGL

SEQ ID NO: 3601 - protein, 14 aa, synthetic construct
FDTYCKPAWMCEGF

SEQ ID NO: 3602 - protein, 14 aa, synthetic construct
PTLRCEPLWMCAGF

SEQ ID NO: 3603 - protein, 14 aa, synthetic construct
ESLLCKPKWMCDWL

SEQ ID NO: 3604 - protein, 14 aa, synthetic construct
VDAYCKPAWMCLGF

SEQ ID NO: 3605 - protein, 14 aa, synthetic construct
EDYVCRPTWMCVGF

SEQ ID NO: 3606 - protein, 14 aa, synthetic construct
MDVLCRPEWMCTGF

SEQ ID NO: 3607 - protein, 14 aa, synthetic construct
PIPRCQPLWMCHGF

SEQ ID NO: 3608 - protein, 14 aa, synthetic construct
YEMRCVPDWMCVGL

SEQ ID NO: 3609 - protein, 14 aa, synthetic construct
ETLMCIPNWMCDGF

SEQ ID NO: 3610 - protein, 14 aa, synthetic construct
TDVMCVPQWMCDGF

SEQ ID NO: 3611 - protein, 14 aa, synthetic construct
TEVMCRPLWMCAGF

SEQ ID NO: 3612 - protein, 14 aa, synthetic construct
VVIQCQPAWMCDGF

SEQ ID NO: 3613 - protein, 14 aa, synthetic construct
VAVMCRPAWMCYGF

SEQ ID NO: 3614 - protein, 14 aa, synthetic construct
ETFKCVPEWMCTGL

SEQ ID NO: 3615 - protein, 14 aa, synthetic construct
HDAMCKPAWMCAGF

SEQ ID NO: 3616 - protein, 14 aa, synthetic construct
VESMCKPAWMCIGF

SEQ ID NO: 3617 - protein, 14 aa, synthetic construct
MPPVCIPRWMCEGF

SEQ ID NO: 3618 - protein, 14 aa, synthetic construct
MLLQCKPSWMCAGF

SEQ ID NO: 3619 - protein, 14 aa, synthetic construct
GWPVCVPPWMCDGF

SEQ ID NO: 3620 - protein, 14 aa, synthetic construct
EHYACKPEWMCAGF

SEQ ID NO: 3621 - protein, 14 aa, synthetic construct
HSALCIPSWMCQGF

SEQ ID NO: 3622 - protein, 14 aa, synthetic construct
VDRFCEPIWMCIGF

SEQ ID NO: 3623 - protein, 14 aa, synthetic construct
EMFRCTPEWMCAGL

SEQ ID NO: 3624 - protein, 14 aa, synthetic construct
NWKVCEPTWMCEGF

SEQ ID NO: 3625 - protein, 14 aa, synthetic construct
VERACVPAWMCTGF

SEQ ID NO: 3626 - protein, 14 aa, synthetic construct
IEKLCKPQWMCEGF

SEQ ID NO: 3627 - protein, 14 aa, synthetic construct
LEFRCVPEWMCVGF

SEQ ID NO: 3628 - protein, 14 aa, synthetic construct
DLRWCIPEWMCIGI

SEQ ID NO: 3629 - protein, 14 aa, synthetic construct
AEHVCRPAWMCTVF

SEQ ID NO: 3630 - protein, 14 aa, synthetic construct
LLEMCKPHWMCVGF

SEQ ID NO: 3631 - protein, 14 aa, synthetic construct
VEIACKPQWMCLGF

SEQ ID NO: 3632 - protein, 14 aa, synthetic construct
QEFRCVPEWMCIGL

SEQ ID NO: 3633 - protein, 14 aa, synthetic construct
SSVMCIPQWMCSGF

SEQ ID NO: 3634 - protein, 14 aa, synthetic construct
LPIMCKPQWMCNGF

SEQ ID NO: 3635 - protein, 14 aa, synthetic construct
LQVMCVPRWMCEGF

SEQ ID NO: 3636 - protein, 14 aa, synthetic construct
VGHVCIPSWMCDGM

SEQ ID NO: 3637 - protein, 14 aa, synthetic construct
WVIKCVPSWMCAGL

SEQ ID NO: 3638 - protein, 14 aa, synthetic construct
IMPKCVPSWMCTGL

SEQ ID NO: 3639 - protein, 14 aa, synthetic construct
AGSMCTPMWMCTGF

SEQ ID NO: 3640 - protein, 14 aa, synthetic construct
VGPRCVPEWMCIGL

SEQ ID NO: 3641 - protein, 14 aa, synthetic construct
MYIHCVPEWMCRGF

SEQ ID NO: 3642 - protein, 14 aa, synthetic construct
QVVMCTPEWMCSGF

SEQ ID NO: 3643 - protein, 14 aa, synthetic construct
IGVVCKPLWMCHGF

SEQ ID NO: 3644 - protein, 14 aa, synthetic construct
VAPICRPSWMCEWL

SEQ ID NO: 3645 - protein, 14 aa, synthetic construct
VDRLCSPAWMCLGF

SEQ ID NO: 3646 - protein, 14 aa, synthetic construct
MEAMCRPAWMCAGF

SEQ ID NO: 3647 - protein, 14 aa, synthetic construct
VNELCIPSWMCNGF

SEQ ID NO: 3648 - protein, 14 aa, synthetic construct
PELWCVPSWMCEGF

SEQ ID NO: 3649 - protein, 14 aa, synthetic construct
IEFLCKPMWMCNGF

SEQ ID NO: 3650 - protein, 14 aa, synthetic construct
IDRMCKPVWMCEGF

SEQ ID NO: 3651 - protein, 14 aa, synthetic construct
EGRYCVPEWMCQGF

SEQ ID NO: 3652 - protein, 14 aa, synthetic construct
IVDICKPSWMCEGF

SEQ ID NO: 3653 - protein, 14 aa, synthetic construct
LEVLCKPTWMCVGF

SEQ ID NO: 3654 - protein, 14 aa, synthetic construct
VDALCRPSWMCIGF

SEQ ID NO: 3655 - protein, 14 aa, synthetic construct
TASMCKPPWMCLGF

SEQ ID NO: 3656 - protein, 14 aa, synthetic construct
MHFHCKPAWMCQGL

SEQ ID NO: 3657 - protein, 14 aa, synthetic construct
QYPVCKPAWMCEGF

SEQ ID NO: 3658 - protein, 14 aa, synthetic construct
MEPVCKPKWMCQGF

SEQ ID NO: 3659 - protein, 14 aa, synthetic construct
TAPMCKPEWMCVAL

SEQ ID NO: 3660 - protein, 14 aa, synthetic construct
MERLCMPSWMCGGF

SEQ ID NO: 3661 - protein, 14 aa, synthetic construct
GELKCIPPWMCEGF

SEQ ID NO: 3662 - protein, 14 aa, synthetic construct
SEYRCVPNWMCSGF

SEQ ID NO: 3663 - protein, 14 aa, synthetic construct
QSPMCKPDWMCLGF

SEQ ID NO: 3664 - protein, 14 aa, synthetic construct
YEQRCVPVWMCEGF

SEQ ID NO: 3665 - protein, 14 aa, synthetic construct
HIKECTPRWMCVGF

SEQ ID NO: 3666 - protein, 14 aa, synthetic construct
GDIRCVPEWMCSGL

SEQ ID NO: 3667 - protein, 14 aa, synthetic construct
VRPMCEPVWMCMGF

SEQ ID NO: 3668 - protein, 14 aa, synthetic construct
VDHVCRPIWMCIGF

SEQ ID NO: 3669 - protein, 14 aa, synthetic construct
SEHFCRPAWMCTGF

SEQ ID NO: 3670 - protein, 14 aa, synthetic construct
GQMYCKPSWMCNGF

SEQ ID NO: 3671 - protein, 14 aa, synthetic construct
IGLLCAPKWMCEGF

SEQ ID NO: 3672 - protein, 14 aa, synthetic construct
LSWHCIPEWMCAGF

SEQ ID NO: 3673 - protein, 14 aa, synthetic construct
DTIQCKPAWMCVGF

SEQ ID NO: 3674 - protein, 14 aa, synthetic construct
VIIKCEPRWMCEGF

SEQ ID NO: 3675 - protein, 14 aa, synthetic construct
VESWCIPAWMCTGF

SEQ ID NO: 3676 - protein, 14 aa, synthetic construct
FPVRCVPEWMCSGF

SEQ ID NO: 3677 - protein, 14 aa, synthetic construct
WMPYCVPHWMCDGF

SEQ ID NO: 3678 - protein, 14 aa, synthetic construct
HDLSCVPRWMCDGF

SEQ ID NO: 3679 - protein, 14 aa, synthetic construct
EDVLCKPLWMCFGF

SEQ ID NO: 3680 - protein, 14 aa, synthetic construct
ESNFCVPAWMCTGF

SEQ ID NO: 3681 - protein, 14 aa, synthetic construct
FEMLCRPIWMCTGF

SEQ ID NO: 3682 - protein, 14 aa, synthetic construct
QLPMCVPRWMCDGW

SEQ ID NO: 3683 - protein, 14 aa, synthetic construct
DHVMCKPKWMCEGF

SEQ ID NO: 3684 - protein, 14 aa, synthetic construct
IAVMCKPEWMCVGF

SEQ ID NO: 3685 - protein, 14 aa, synthetic construct
HTPICVPVWMCAGF

SEQ ID NO: 3686 - protein, 14 aa, synthetic construct
LSIKCVPDWMCTGF

SEQ ID NO: 3687 - protein, 14 aa, synthetic construct
PHAICKPAWMCVGL

SEQ ID NO: 3688 - protein, 14 aa, synthetic construct
DFAMCRPAWMCGGF

SEQ ID NO: 3689 - protein, 14 aa, synthetic construct
GHPICVPSWMCEGF

SEQ ID NO: 3690 - protein, 14 aa, synthetic construct
IDKMCVPSWMCWGF

SEQ ID NO: 3691 - protein, 14 aa, synthetic construct
QEIYCVPEWMCSWF

SEQ ID NO: 3692 - protein, 14 aa, synthetic construct
EYIRCVPSWMCLDL

SEQ ID NO: 3693 - protein, 14 aa, synthetic construct
HDLRCVPEWMCYGL

SEQ ID NO: 3694 - protein, 14 aa, synthetic construct
DVRLCRPSWMCSGF

SEQ ID NO: 3695 - protein, 14 aa, synthetic construct
QVPMCKPMWMCAGF

SEQ ID NO: 3696 - protein, 14 aa, synthetic construct
AEVRCVPQWMCFGL

SEQ ID NO: 3697 - protein, 14 aa, synthetic construct
EMRYCVPRWMCEGF

SEQ ID NO: 3698 - protein, 14 aa, synthetic construct
VEPLCRPFWMCVGF

SEQ ID NO: 3699 - protein, 14 aa, synthetic construct
NGALCKPVWMCQGF

SEQ ID NO: 3700 - protein, 14 aa, synthetic construct
LEVHCRPSWMCVGF

SEQ ID NO: 3701 - protein, 14 aa, synthetic construct
ILPQCVPSWMCEGF

SEQ ID NO: 3702 - protein, 14 aa, synthetic construct
FTALCKPMWMCRGF

SEQ ID NO: 3703 - protein, 14 aa, synthetic construct
FSVRCVPEWMCAGF

SEQ ID NO: 3704 - protein, 14 aa, synthetic construct
MQMMCKPDWMCEGF

SEQ ID NO: 3705 - protein, 14 aa, synthetic construct
IGAMCEPKWMCFGF

SEQ ID NO: 3706 - protein, 14 aa, synthetic construct
QGTLCVPSWMCSGF

SEQ ID NO: 3707 - protein, 14 aa, synthetic construct
IEAVCKPSWMCAGF

SEQ ID NO: 3708 - protein, 14 aa, synthetic construct
TEILCVPEWMCIGL

SEQ ID NO: 3709 - protein, 14 aa, synthetic construct
ENHYCRPAWMCNGF

SEQ ID NO: 3710 - protein, 14 aa, synthetic construct
ITVICKPAWMCEFL

SEQ ID NO: 3711 - protein, 14 aa, synthetic construct
ASVLCVPAWMCSGF

SEQ ID NO: 3712 - protein, 14 aa, synthetic construct
GFPWCEPQWMCIGF

SEQ ID NO: 3713 - protein, 14 aa, synthetic construct
FGIYCVPEWMCTGL

SEQ ID NO: 3714 - protein, 14 aa, synthetic construct
IELMCRPLWMCMGF

SEQ ID NO: 3715 - protein, 14 aa, synthetic construct
TQALCKPAWMCKGF

SEQ ID NO: 3716 - protein, 14 aa, synthetic construct
FERLCIPEWMCSAF

SEQ ID NO: 3717 - protein, 14 aa, synthetic construct
FRDYCVPPWMCVGM

SEQ ID NO: 3718 - protein, 14 aa, synthetic construct
QFLVCKPSWMCNGF

SEQ ID NO: 3719 - protein, 14 aa, synthetic construct
VERYCVPQWMCDGF

SEQ ID NO: 3720 - protein, 14 aa, synthetic construct
AALRCVPTWMCEGF

SEQ ID NO: 3721 - protein, 14 aa, synthetic construct
QLPLCVPEWMCLGL

SEQ ID NO: 3722 - protein, 14 aa, synthetic construct
AQGVCIPQWMCDGF

SEQ ID NO: 3723 - protein, 14 aa, synthetic construct
SEILCRPAWMCTGF

SEQ ID NO: 3724 - protein, 14 aa, synthetic construct
GDHYCKPDWMCSGF

SEQ ID NO: 3725 - protein, 14 aa, synthetic construct
DTFMCRPSWMCNGF

SEQ ID NO: 3726 - protein, 14 aa, synthetic construct
VEPLCRPMWMCEGI

SEQ ID NO: 3727 - protein, 14 aa, synthetic construct
SLAQCVPEWMCFGF

SEQ ID NO: 3728 - protein, 14 aa, synthetic construct
ELVRCIPVWMCQGF

SEQ ID NO: 3729 - protein, 14 aa, synthetic construct
SVKVCKPAWMCAGF

SEQ ID NO: 3730 - protein, 14 aa, synthetic construct
DFVRCVPDWMCQGF

SEQ ID NO: 3731 - protein, 14 aa, synthetic construct
METWCVPTWMCTGF

SEQ ID NO: 3732 - protein, 14 aa, synthetic construct
DTWICKPEWMCMGF

SEQ ID NO: 3733 - protein, 14 aa, synthetic construct
VERACRPVWMCQGF

SEQ ID NO: 3734 - protein, 14 aa, synthetic construct
IMPTCVPQWMCNGF

SEQ ID NO: 3735 - protein, 14 aa, synthetic construct
MLPYCVPQWMCMGF

SEQ ID NO: 3736 - protein, 14 aa, synthetic construct
NDVKCIPEWMCVGF

SEQ ID NO: 3737 - protein, 14 aa, synthetic construct
TDPLCIPEWMCQGM

SEQ ID NO: 3738 - protein, 14 aa, synthetic construct
LSTLCIPQWMCTGL

SEQ ID NO: 3739 - protein, 14 aa, synthetic construct
YFQMCAPRWMCEGF

SEQ ID NO: 3740 - protein, 14 aa, synthetic construct
IDQICKPAWMCSGF

SEQ ID NO: 3741 - protein, 14 aa, synthetic construct
LEIMCRPEWMCSGF

SEQ ID NO: 3742 - protein, 14 aa, synthetic construct
MTPRCIPSWMCFGM

SEQ ID NO: 3743 - protein, 14 aa, synthetic construct
SSMLCIPTWMCGGF

SEQ ID NO: 3744 - protein, 14 aa, synthetic construct
TSLRCVPEWMCSGF

SEQ ID NO: 3745 - protein, 14 aa, synthetic construct
SLPICKPEWMCVGL

SEQ ID NO: 3746 - protein, 14 aa, synthetic construct
VEKMCKPVWMCNGF

SEQ ID NO: 3747 - protein, 14 aa, synthetic construct
EDILCKPVWMCIGF

SEQ ID NO: 3748 - protein, 14 aa, synthetic construct
SFLRCEPMWMCLGF

SEQ ID NO: 3749 - protein, 14 aa, synthetic construct
IEPHCVPAWMCTGF

SEQ ID NO: 3750 - protein, 14 aa, synthetic construct
EIPYCVPQWMCVAM

SEQ ID NO: 3751 - protein, 14 aa, synthetic construct
VLHMCVPLWMCHGL

SEQ ID NO: 3752 - protein, 14 aa, synthetic construct
VKPVCKPVWMCVGF

SEQ ID NO: 3753 - protein, 14 aa, synthetic construct
PGPSCVPSWMCVGF

SEQ ID NO: 3754 - protein, 14 aa, synthetic construct
PAQMCIPQWMCNWL

SEQ ID NO: 3755 - protein, 14 aa, synthetic construct
SPIMCTPDWMCLGF

SEQ ID NO: 3756 - protein, 14 aa, synthetic construct
PVRVCIPQWMCIGF

SEQ ID NO: 3757 - protein, 14 aa, synthetic construct
ETMICKPEWMCTGF

SEQ ID NO: 3758 - protein, 14 aa, synthetic construct
VTPRCIPEWMCAGF

SEQ ID NO: 3759 - protein, 14 aa, synthetic construct
YGLRCEPAWMCQGF

SEQ ID NO: 3760 - protein, 14 aa, synthetic construct
TPHACVPDWMCYGF

SEQ ID NO: 3761 - protein, 14 aa, synthetic construct
ITPMCIPAWMCEGV

SEQ ID NO: 3762 - protein, 14 aa, synthetic construct
MPIYCVPEWMCQGL

SEQ ID NO: 3763 - protein, 14 aa, synthetic construct
YNMICQPQWMCSGF

SEQ ID NO: 3764 - protein, 14 aa, synthetic construct
LEKVCKPMWMCTGF

SEQ ID NO: 3765 - protein, 14 aa, synthetic construct
EDVRCVPAWMCNGF

SEQ ID NO: 3766 - protein, 14 aa, synthetic construct
PLKLCIPEWMCVEL

SEQ ID NO: 3767 - protein, 14 aa, synthetic construct
TINICKPQWMCIGF

SEQ ID NO: 3768 - protein, 14 aa, synthetic construct
MERFCIPSWMCEGL

SEQ ID NO: 3769 - protein, 14 aa, synthetic construct
FEFRCTPEWMCRGF

SEQ ID NO: 3770 - protein, 14 aa, synthetic construct
VTMRCTPDWMCVGF

SEQ ID NO: 3771 - protein, 14 aa, synthetic construct
IEALCVPDWMCRGF

SEQ ID NO: 3772 - protein, 14 aa, synthetic construct
HIMQCKPAWMCSGL

SEQ ID NO: 3773 - protein, 14 aa, synthetic construct
VEKMCRPLWMCHGF

SEQ ID NO: 3774 - protein, 14 aa, synthetic construct
VVAQCVPRWMCDGF

SEQ ID NO: 3775 - protein, 14 aa, synthetic construct
SPPLCVPVWMCHGF

SEQ ID NO: 3776 - protein, 14 aa, synthetic construct
NAIMCRPAWMCSGF

SEQ ID NO: 3777 - protein, 14 aa, synthetic construct
TELLCTPRWMCEGF

SEQ ID NO: 3778 - protein, 14 aa, synthetic construct
VLRSCVPEWMCSGF

SEQ ID NO: 3779 - protein, 14 aa, synthetic construct
EVLLCKPEWMCTGF

SEQ ID NO: 3780 - protein, 14 aa, synthetic construct
EIKHCIPEWMCSGF

SEQ ID NO: 3781 - protein, 14 aa, synthetic construct
ETHFCKPKWMCVGF

SEQ ID NO: 3782 - protein, 14 aa, synthetic construct
LEAACRPMWMCLGF

SEQ ID NO: 3783 - protein, 14 aa, synthetic construct
WEARCQPTWMCTGF

SEQ ID NO: 3784 - protein, 14 aa, synthetic construct
TNPMCVPEWMCYGF

SEQ ID NO: 3785 - protein, 14 aa, synthetic construct
EIVKCVPPWMCSGI

SEQ ID NO: 3786 - protein, 14 aa, synthetic construct
VDQVCIPDWMCNGF

SEQ ID NO: 3787 - protein, 14 aa, synthetic construct
SVPSCVPPWMCIGF

SEQ ID NO: 3788 - protein, 14 aa, synthetic construct
QEVWCRPIWMCEGF

SEQ ID NO: 3789 - protein, 14 aa, synthetic construct
EGTWCRPAWMCDGF

SEQ ID NO: 3790 - protein, 14 aa, synthetic construct
LERACKPMWMCEGF

SEQ ID NO: 3791 - protein, 14 aa, synthetic construct
EDRICEPDWMCAGF

SEQ ID NO: 3792 - protein, 14 aa, synthetic construct
VSPMCRPAWMCEGL

SEQ ID NO: 3793 - protein, 14 aa, synthetic construct
VWKTCVPEWMCVGY

SEQ ID NO: 3794 - protein, 14 aa, synthetic construct
SDKFCVPEWMCEWI

SEQ ID NO: 3795 - protein, 14 aa, synthetic construct
MDARCVPSWMCIGV

SEQ ID NO: 3796 - protein, 14 aa, synthetic construct
EFIKCEPKWMCQGF

SEQ ID NO: 3797 - protein, 14 aa, synthetic construct
DTIACRPEWMCTGF

SEQ ID NO: 3798 - protein, 14 aa, synthetic construct
YFKHCVPQWMCEGF

SEQ ID NO: 3799 - protein, 14 aa, synthetic construct
ITPACVPEWMCLGL

SEQ ID NO: 3800 - protein, 14 aa, synthetic construct
AERMCVPSWMCQGL

SEQ ID NO: 3801 - protein, 14 aa, synthetic construct
EAIRCVPVWMCQGF

SEQ ID NO: 3802 - protein, 14 aa, synthetic construct
YSQMCKPAWMCNGF

SEQ ID NO: 3803 - protein, 14 aa, synthetic construct
PVAVCKPAWMCEGF

SEQ ID NO: 3804 - protein, 14 aa, synthetic construct
ITQMCKPAWMCVGL

SEQ ID NO: 3805 - protein, 14 aa, synthetic construct
LDRMCVPLWMCEGF

SEQ ID NO: 3806 - protein, 14 aa, synthetic construct
VNMICKPAWMCKGF

SEQ ID NO: 3807 - protein, 14 aa, synthetic construct
LEMVCKPEWMCLGL

SEQ ID NO: 3808 - protein, 14 aa, synthetic construct
DILRCVPEWMCTGF

SEQ ID NO: 3809 - protein, 14 aa, synthetic construct
YPTWCVPTWMCTGM

SEQ ID NO: 3810 - protein, 14 aa, synthetic construct
DYMMCSPDWMCKGF

SEQ ID NO: 3811 - protein, 14 aa, synthetic construct
SMAWCVPNWMCTGF

SEQ ID NO: 3812 - protein, 14 aa, synthetic construct
QDMVCRPAWMCTGF

SEQ ID NO: 3813 - protein, 14 aa, synthetic construct
VDRICKPDWMCAGF

SEQ ID NO: 3814 - protein, 14 aa, synthetic construct
TVHYCTPSWMCTGF

SEQ ID NO: 3815 - protein, 14 aa, synthetic construct
THPLCVPTWMCSGF

SEQ ID NO: 3816 - protein, 14 aa, synthetic construct
YDHFCVPRWMCEGL

SEQ ID NO: 3817 - protein, 14 aa, synthetic construct
PLRYCEPAWMCFGF

SEQ ID NO: 3818 - protein, 14 aa, synthetic construct
WLYSCIPQWMCTGF

SEQ ID NO: 3819 - protein, 14 aa, synthetic construct
EAPACVPVWMCNGF

SEQ ID NO: 3820 - protein, 14 aa, synthetic construct
NIIHCVPPWMCDGF

SEQ ID NO: 3821 - protein, 14 aa, synthetic construct
IEIRCKPEWMCTSF

SEQ ID NO: 3822 - protein, 14 aa, synthetic construct
LTQMCKPLWMCAGF

SEQ ID NO: 3823 - protein, 14 aa, synthetic construct
AEPVCVPDWMCFGF

SEQ ID NO: 3824 - protein, 14 aa, synthetic construct
VDHRCVPSWMCYGL

SEQ ID NO: 3825 - protein, 14 aa, synthetic construct
EYMRCEPSWMCYGF

SEQ ID NO: 3826 - protein, 14 aa, synthetic construct
ADIYCKPVWMCTGF

SEQ ID NO: 3827 - protein, 14 aa, synthetic construct
VGHMCKPVWMCAGL

SEQ ID NO: 3828 - protein, 14 aa, synthetic construct
TEQICKPAWMCTGL

SEQ ID NO: 3829 - protein, 14 aa, synthetic construct
SVTTCIPPWMCTGF

SEQ ID NO: 3830 - protein, 14 aa, synthetic construct
VVKHCVPTWMCAGF

SEQ ID NO: 3831 - protein, 14 aa, synthetic construct
PELACIPEWMCIGF

SEQ ID NO: 3832 - protein, 14 aa, synthetic construct
SVAYCVPTWMCDGL

SEQ ID NO: 3833 - protein, 14 aa, synthetic construct
MVPRCEPEWMCVGF

SEQ ID NO: 3834 - protein, 14 aa, synthetic construct
GPKICVPMWMCDGF

SEQ ID NO: 3835 - protein, 14 aa, synthetic construct
SAIRCEPLWMCSGL

SEQ ID NO: 3836 - protein, 14 aa, synthetic construct
EVQYCVPAWMCEGF

SEQ ID NO: 3837 - protein, 14 aa, synthetic construct
PSISCTPQWMCFGF

SEQ ID NO: 3838 - protein, 14 aa, synthetic construct
ALLSCVPPWMCLGL

SEQ ID NO: 3839 - protein, 14 aa, synthetic construct
DMARCIPAWMCTGF

SEQ ID NO: 3840 - protein, 14 aa, synthetic construct
ELLHCKPMWMCIGL

SEQ ID NO: 3841 - protein, 14 aa, synthetic construct
YPPLCKPEWMCVGL

SEQ ID NO: 3842 - protein, 14 aa, synthetic construct
LIALCKPPWMCEWF

SEQ ID NO: 3843 - protein, 14 aa, synthetic construct
WFRMCEPSWMCEGF

SEQ ID NO: 3844 - protein, 14 aa, synthetic construct
GYVMCEPRWMCEGL

SEQ ID NO: 3845 - protein, 14 aa, synthetic construct
VVPWCSPAWMCSGF

SEQ ID NO: 3846 - protein, 14 aa, synthetic construct
EERICKPQWMCSAF

SEQ ID NO: 3847 - protein, 14 aa, synthetic construct
VSPSCVPPWMCVGF

SEQ ID NO: 3848 - protein, 14 aa, synthetic construct
VVRHCVPTWMCTGF

SEQ ID NO: 3849 - protein, 14 aa, synthetic construct
VERVCVPQWMCSGF

SEQ ID NO: 3850 - protein, 14 aa, synthetic construct
ESVYCIPQWMCSGL

SEQ ID NO: 3851 - protein, 14 aa, synthetic construct
LNAMCVPAWMCTGF

SEQ ID NO: 3852 - protein, 14 aa, synthetic construct
LEMACRPMWMCQGL

SEQ ID NO: 3853 - protein, 14 aa, synthetic construct
FEVACIPQWMCDGF

SEQ ID NO: 3854 - protein, 14 aa, synthetic construct
IARTCVPAWMCSGF

SEQ ID NO: 3855 - protein, 14 aa, synthetic construct
DVRMCVPEWMCSGF

SEQ ID NO: 3856 - protein, 14 aa, synthetic construct
VKPMCVPEWMCSGL

SEQ ID NO: 3857 - protein, 14 aa, synthetic construct
ENLICKPAWMCVGF

SEQ ID NO: 3858 - protein, 14 aa, synthetic construct
LYVKCSPEWMCIGF

SEQ ID NO: 3859 - protein, 14 aa, synthetic construct
VTPQCVPMWMCTGF

SEQ ID NO: 3860 - protein, 14 aa, synthetic construct
FLQACKPPWMCTGF

SEQ ID NO: 3861 - protein, 14 aa, synthetic construct
VVKACIPEWMCSGF

SEQ ID NO: 3862 - protein, 14 aa, synthetic construct
DARACVPEWMCYGF

SEQ ID NO: 3863 - protein, 14 aa, synthetic construct
TERVCVPDWMCAGF

SEQ ID NO: 3864 - protein, 14 aa, synthetic construct
TPPFCIPKWMCQGF

SEQ ID NO: 3865 - protein, 14 aa, synthetic construct
MNIMCRPVWMCTGL

SEQ ID NO: 3866 - protein, 14 aa, synthetic construct
MERMCVPSWMCTGF

SEQ ID NO: 3867 - protein, 14 aa, synthetic construct
IEKVCVPAWMCMGF

SEQ ID NO: 3868 - protein, 14 aa, synthetic construct
VDRLCVPNWMCMGL

SEQ ID NO: 3869 - protein, 14 aa, synthetic construct
DPVKCMPAWMCSGF

SEQ ID NO: 3870 - protein, 14 aa, synthetic construct
AGMMCTPPWMCFGF

SEQ ID NO: 3871 - protein, 14 aa, synthetic construct
LAVRCIPEWMCYGL

SEQ ID NO: 3872 - protein, 14 aa, synthetic construct
QSMMCIPSWMCVGF

SEQ ID NO: 3873 - protein, 14 aa, synthetic construct
VVPLCVPMWMCSPM

SEQ ID NO: 3874 - protein, 14 aa, synthetic construct
VEPACVPLWMCFGL

SEQ ID NO: 3875 - protein, 14 aa, synthetic construct
TYFRCEPSWMCTGL

SEQ ID NO: 3876 - protein, 14 aa, synthetic construct
MERWCIPVWMCQGL

SEQ ID NO: 3877 - protein, 14 aa, synthetic construct
VVNFCKPQWMCSGF

SEQ ID NO: 3878 - protein, 14 aa, synthetic construct
DDIRCEPIWMCTGF

SEQ ID NO: 3879 - protein, 14 aa, synthetic construct
EHRICVPQWMCTGF

SEQ ID NO: 3880 - protein, 14 aa, synthetic construct
SPSYCVPKWMCVGF

SEQ ID NO: 3881 - protein, 14 aa, synthetic construct
ELLKCVPQWMCTGF

SEQ ID NO: 3882 - protein, 14 aa, synthetic construct
VSTMCVPEWMCGGF

SEQ ID NO: 3883 - protein, 14 aa, synthetic construct
DAMLCRPSWMCDGF

SEQ ID NO: 3884 - protein, 14 aa, synthetic construct
PEAYCVPSWMCTGF

SEQ ID NO: 3885 - protein, 14 aa, synthetic construct
VAQWCTPSWMCDGF

SEQ ID NO: 3886 - protein, 14 aa, synthetic construct
VDKACTPAWMCTGF

SEQ ID NO: 3887 - protein, 14 aa, synthetic construct
EMPLCIPQWMCGGF

SEQ ID NO: 3888 - protein, 14 aa, synthetic construct
VPTLCKPSWMCYGF

SEQ ID NO: 3889 - protein, 14 aa, synthetic construct
AWMRCEPAWMCVGF

SEQ ID NO: 3890 - protein, 14 aa, synthetic construct
EDIKCIPRWMCEGF

SEQ ID NO: 3891 - protein, 14 aa, synthetic construct
FIAQCQPTWMCTGF

SEQ ID NO: 3892 - protein, 14 aa, synthetic construct
ETFTCKPPWMCIGF

SEQ ID NO: 3893 - protein, 14 aa, synthetic construct
YEKLCEPRWMCDGF

SEQ ID NO: 3894 - protein, 14 aa, synthetic construct
YDVVCKPAWMCNGF

SEQ ID NO: 3895 - protein, 14 aa, synthetic construct
GMGMCVPTWMCTGM

SEQ ID NO: 3896 - protein, 14 aa, synthetic construct
QLAMCVPLWMCYGF

SEQ ID NO: 3897 - protein, 14 aa, synthetic construct
LGHWCSPTWMCMGF

SEQ ID NO: 3898 - protein, 14 aa, synthetic construct
ESYTCVPMWMCTGF

SEQ ID NO: 3899 - protein, 14 aa, synthetic construct
NIMRCQPSWMCTGF

SEQ ID NO: 3900 - protein, 14 aa, synthetic construct
PSPICRPEWMCVWL

SEQ ID NO: 3901 - protein, 14 aa, synthetic construct
TFMRCEPVWMCDGF

SEQ ID NO: 3902 - protein, 14 aa, synthetic construct
NLGWCVPVWMCEGF

SEQ ID NO: 3903 - protein, 14 aa, synthetic construct
HEPVCRPEWMCQGF

SEQ ID NO: 3904 - protein, 14 aa, synthetic construct
ESHLCRPAWMCTGF

SEQ ID NO: 3905 - protein, 14 aa, synthetic construct
TTLMCTPQWMCDGF

SEQ ID NO: 3906 - protein, 14 aa, synthetic construct
MPGACVPLWMCYGF

SEQ ID NO: 3907 - protein, 14 aa, synthetic construct
EELMCRPVWMCLGF

SEQ ID NO: 3908 - protein, 14 aa, synthetic construct
VEKMCKPAWMCNVF

SEQ ID NO: 3909 - protein, 14 aa, synthetic construct
PDPLCVPNWMCIGL

SEQ ID NO: 3910 - protein, 14 aa, synthetic construct
TEIRCQPQWMCHGF

SEQ ID NO: 3911 - protein, 14 aa, synthetic construct
QGVACIPTWMCTGF

SEQ ID NO: 3912 - protein, 14 aa, synthetic construct
LERLCRPAWMCDGF

SEQ ID NO: 3913 - protein, 14 aa, synthetic construct
EIPWCVPSWMCNYF

SEQ ID NO: 3914 - protein, 14 aa, synthetic construct
VETLCRPAWMCWGF

SEQ ID NO: 3915 - protein, 14 aa, synthetic construct
QDLKCVPSWMCSGF

SEQ ID NO: 3916 - protein, 14 aa, synthetic construct
WEVRCEPAWMCIGL

SEQ ID NO: 3917 - protein, 14 aa, synthetic construct
VMHRCEPSWMCWGF

SEQ ID NO: 3918 - protein, 14 aa, synthetic construct
HEPVCKPSWMCTGL

SEQ ID NO: 3919 - protein, 14 aa, synthetic construct
EGLRCVPAWMCAGF

SEQ ID NO: 3920 - protein, 14 aa, synthetic construct
HVAMCQPTWMCMGF

SEQ ID NO: 3921 - protein, 14 aa, synthetic construct
WTFKCEPVWMCEGF

SEQ ID NO: 3922 - protein, 14 aa, synthetic construct
VVVSCTPSWMCTGL

SEQ ID NO: 3923 - protein, 14 aa, synthetic construct
LDIVCRPSWMCYGF

SEQ ID NO: 3924 - protein, 14 aa, synthetic construct
ETVRCIPSWMCTGL

SEQ ID NO: 3925 - protein, 14 aa, synthetic construct
SHMVCKPTWMCQGF

SEQ ID NO: 3926 - protein, 14 aa, synthetic construct
VQPACVPIWMCDGL

SEQ ID NO: 3927 - protein, 14 aa, synthetic construct
VDRLCMPIWMCEGL

SEQ ID NO: 3928 - protein, 14 aa, synthetic construct
DPVMCMPRWMCDGF

SEQ ID NO: 3929 - protein, 14 aa, synthetic construct
ETMRCEPSWMCIGL

SEQ ID NO: 3930 - protein, 14 aa, synthetic construct
GWEWCIPEWMCTGL

SEQ ID NO: 3931 - protein, 14 aa, synthetic construct
LDRLCLPQWMCVGM

SEQ ID NO: 3932 - protein, 14 aa, synthetic construct
ESRLCVPMWMCSGF

SEQ ID NO: 3933 - protein, 14 aa, synthetic construct
DFIRCSPIWMCDGF

SEQ ID NO: 3934 - protein, 14 aa, synthetic construct
VVAVCKPLWMCEAF

SEQ ID NO: 3935 - protein, 14 aa, synthetic construct
ADHMCVPQWMCSGF

SEQ ID NO: 3936 - protein, 14 aa, synthetic construct
DERMCVPEWMCMGM

SEQ ID NO: 3937 - protein, 14 aa, synthetic construct
HDYACVPKWMCEGL

SEQ ID NO: 3938 - protein, 14 aa, synthetic construct
YMMKCIPEWMCTGL

SEQ ID NO: 3939 - protein, 14 aa, synthetic construct
IVKFCIPQWMCDGF

SEQ ID NO: 3940 - protein, 14 aa, synthetic construct
DDRVCRPDWMCNGF

SEQ ID NO: 3941 - protein, 14 aa, synthetic construct
DWVMCKPEWMCAGF

SEQ ID NO: 3942 - protein, 14 aa, synthetic construct
AGYACVPSWMCEGF

SEQ ID NO: 3943 - protein, 14 aa, synthetic construct
LAVKCEPAWMCTGF

SEQ ID NO: 3944 - protein, 14 aa, synthetic construct
VHPMCTPLWMCVGF

SEQ ID NO: 3945 - protein, 14 aa, synthetic construct
DLMMCVPAWMCEGF

SEQ ID NO: 3946 - protein, 14 aa, synthetic construct
ELHLCIPSWMCTGL

SEQ ID NO: 3947 - protein, 14 aa, synthetic construct
LVNYCIPPWMCAGF

SEQ ID NO: 3948 - protein, 14 aa, synthetic construct
ELILCRPSWMCTGL

SEQ ID NO: 3949 - protein, 14 aa, synthetic construct
SHALCRPAWMCMGL

SEQ ID NO: 3950 - protein, 14 aa, synthetic construct
GTTWCVPTWMCEGL

SEQ ID NO: 3951 - protein, 14 aa, synthetic construct
EVAMCKPLWMCSGF

SEQ ID NO: 3952 - protein, 14 aa, synthetic construct
VEPLCRPTWMCMSL

SEQ ID NO: 3953 - protein, 14 aa, synthetic construct
AEVKCIPTWMCTGF

SEQ ID NO: 3954 - protein, 14 aa, synthetic construct
VHQLCIPVWMCSGF

SEQ ID NO: 3955 - protein, 14 aa, synthetic construct
YPPLCVPMWMCNGF

SEQ ID NO: 3956 - protein, 14 aa, synthetic construct
FPAMCKPSWMCTGF

SEQ ID NO: 3957 - protein, 14 aa, synthetic construct
SNMVCIPSWMCNGF

SEQ ID NO: 3958 - protein, 14 aa, synthetic construct
VTMKCQPMWMCQGL

SEQ ID NO: 3959 - protein, 14 aa, synthetic construct
ADRVCKPAWMCDLF

SEQ ID NO: 3960 - protein, 14 aa, synthetic construct
PNILCKPQWMCAGF

SEQ ID NO: 3961 - protein, 14 aa, synthetic construct
VDVRCMPLWMCSGF

SEQ ID NO: 3962 - protein, 14 aa, synthetic construct
TAVMCIPYWMCGGM

SEQ ID NO: 3963 - protein, 14 aa, synthetic construct
MVPVCIPLWMCSGF

SEQ ID NO: 3964 - protein, 14 aa, synthetic construct
PLVLCIPQWMCQAM

SEQ ID NO: 3965 - protein, 14 aa, synthetic construct
LQTLCIPPWMCMGF

SEQ ID NO: 3966 - protein, 14 aa, synthetic construct
EQVLCRPAWMCLGF

SEQ ID NO: 3967 - protein, 14 aa, synthetic construct
SVVMCVPEWMCQGF

SEQ ID NO: 3968 - protein, 14 aa, synthetic construct
PSAVCVPTWMCSGF

SEQ ID NO: 3969 - protein, 14 aa, synthetic construct
VQILCRPQWMCEGL

SEQ ID NO: 3970 - protein, 14 aa, synthetic construct
LALACVPPWMCQGL

SEQ ID NO: 3971 - protein, 14 aa, synthetic construct
VERMCEPLWMCAGL

SEQ ID NO: 3972 - protein, 14 aa, synthetic construct
ETSWCTPSWMCTGF

SEQ ID NO: 3973 - protein, 14 aa, synthetic construct
SMIYCIPSWMCEGM

SEQ ID NO: 3974 - protein, 14 aa, synthetic construct
IDRHCTPSWMCYGF

SEQ ID NO: 3975 - protein, 14 aa, synthetic construct
DHKLCKPEWMCAGL

SEQ ID NO: 3976 - protein, 14 aa, synthetic construct
MVSHCVPLWMCAGF

SEQ ID NO: 3977 - protein, 14 aa, synthetic construct
VAIACTPMWMCTGF

SEQ ID NO: 3978 - protein, 14 aa, synthetic construct
HVAACVPSWMCTGF

SEQ ID NO: 3979 - protein, 14 aa, synthetic construct
EGPLCKPAWMCRGF

SEQ ID NO: 3980 - protein, 14 aa, synthetic construct
PVPYCRPIWMCQGL

SEQ ID NO: 3981 - protein, 14 aa, synthetic construct
ESRFCVPAWMCAAV

SEQ ID NO: 3982 - protein, 14 aa, synthetic construct
EVRRCEPSWMCSVV

SEQ ID NO: 3983 - protein, 14 aa, synthetic construct
YIQACKPRWMCNGF

SEQ ID NO: 3984 - protein, 14 aa, synthetic construct
LQVLCVPDWMCAGF

SEQ ID NO: 3985 - protein, 14 aa, synthetic construct
GHVYCEPQWMCYGF

SEQ ID NO: 3986 - protein, 14 aa, synthetic construct
PELRCHPPWMCTGF

SEQ ID NO: 3987 - protein, 14 aa, synthetic construct
ISIKCEPQWMCDGL

SEQ ID NO: 3988 - protein, 14 aa, synthetic construct
AAKYCEPSWMCYGF

SEQ ID NO: 3989 - protein, 14 aa, synthetic construct
LGKICSPAWMCSGF

SEQ ID NO: 3990 - protein, 14 aa, synthetic construct
GTMKCEPAWMCEGF

SEQ ID NO: 3991 - protein, 14 aa, synthetic construct
DAMMCKPTWMCDGF

SEQ ID NO: 3992 - protein, 14 aa, synthetic construct
PEARCIPMWMCERL

SEQ ID NO: 3993 - protein, 14 aa, synthetic construct
LVKHCVPDWMCSGF

SEQ ID NO: 3994 - protein, 14 aa, synthetic construct
VIPKCEPKWMCHSL

SEQ ID NO: 3995 - protein, 14 aa, synthetic construct
MIKMCKPYWMCEAM

SEQ ID NO: 3996 - protein, 14 aa, synthetic construct
YTVQCVPTWMCAGL

SEQ ID NO: 3997 - protein, 14 aa, synthetic construct
PHVVCIPEWMCAGF

SEQ ID NO: 3998 - protein, 14 aa, synthetic construct
DERMCRPAWMCEGL

SEQ ID NO: 3999 - protein, 14 aa, synthetic construct
STSWCSPPWMCEGF

SEQ ID NO: 4000 - protein, 14 aa, synthetic construct
ERPACVPMWMCTGL

SEQ ID NO: 4001 - protein, 14 aa, synthetic construct
EMSLCIPAWMCSVF

SEQ ID NO: 4002 - protein, 14 aa, synthetic construct
ADMRCVPDWMCHGF

SEQ ID NO: 4003 - protein, 14 aa, synthetic construct
MIAMCKPPWMCIGL

SEQ ID NO: 4004 - protein, 14 aa, synthetic construct
VVVQCVPKWMCYGF

SEQ ID NO: 4005 - protein, 14 aa, synthetic construct
LPHACKPSWMCQGF

SEQ ID NO: 4006 - protein, 14 aa, synthetic construct
ALSMCVPQWMCQGF

SEQ ID NO: 4007 - protein, 14 aa, synthetic construct
VNERCIPDWMCVGF

SEQ ID NO: 4008 - protein, 14 aa, synthetic construct
DHMMCVPPWMCDGI

SEQ ID NO: 4009 - protein, 14 aa, synthetic construct
SEHYCVPNWMCAGL

SEQ ID NO: 4010 - protein, 14 aa, synthetic construct
TVPRCVPAWMCNWS

SEQ ID NO: 4011 - protein, 14 aa, synthetic construct
SQHSCIPSWMCNGF

SEQ ID NO: 4012 - protein, 14 aa, synthetic construct
TMQMCKPAWMCSQL

SEQ ID NO: 4013 - protein, 14 aa, synthetic construct
NEKLCVPTWMCDGL

SEQ ID NO: 4014 - protein, 14 aa, synthetic construct
DVPYCIPSWMCHGF

SEQ ID NO: 4015 - protein, 14 aa, synthetic construct
YLHECRPEWMCVGF

SEQ ID NO: 4016 - protein, 14 aa, synthetic construct
GLPYCVPSWMCDGF

SEQ ID NO: 4017 - protein, 14 aa, synthetic construct
EVLLCKPSWMCDGF

SEQ ID NO: 4018 - protein, 14 aa, synthetic construct
PGALCVPFWMCQGF

SEQ ID NO: 4019 - protein, 14 aa, synthetic construct
VPRMCIPHWMCEGI

SEQ ID NO: 4020 - protein, 14 aa, synthetic construct
GDVRCVPSWMCEGY

SEQ ID NO: 4021 - protein, 14 aa, synthetic construct
MSMSCVPLWMCSGF

SEQ ID NO: 4022 - protein, 14 aa, synthetic construct
EIPLCRPEWMCTGL

SEQ ID NO: 4023 - protein, 14 aa, synthetic construct
VDHMCKPMWMCNGF

SEQ ID NO: 4024 - protein, 14 aa, synthetic construct
TDRVCTPAWMCQGL

SEQ ID NO: 4025 - protein, 14 aa, synthetic construct
EHIRCQPSWMCWGF

SEQ ID NO: 4026 - protein, 14 aa, synthetic construct
EGRYCVPDWMCLGL

SEQ ID NO: 4027 - protein, 14 aa, synthetic construct
IAFRCVPEWMCSAF

SEQ ID NO: 4028 - protein, 14 aa, synthetic construct
EVWMCRPSWMCDGF

SEQ ID NO: 4029 - protein, 14 aa, synthetic construct
LEGMCKPAWMCTGF

SEQ ID NO: 4030 - protein, 14 aa, synthetic construct
GQAACVPSWMCSGF

SEQ ID NO: 4031 - protein, 14 aa, synthetic construct
YGVQCVPSWMCQGF

SEQ ID NO: 4032 - protein, 14 aa, synthetic construct
IERMCMPPWMCSAL

SEQ ID NO: 4033 - protein, 14 aa, synthetic construct
MEWHCKPKWMCEGF

SEQ ID NO: 4034 - protein, 14 aa, synthetic construct
ESPICKPSWMCSGL

SEQ ID NO: 4035 - protein, 14 aa, synthetic construct
SEALCVPKWMCHGF

SEQ ID NO: 4036 - protein, 14 aa, synthetic construct
EPRACVPFWMCLGF

SEQ ID NO: 4037 - protein, 14 aa, synthetic construct
GENWCVPQWMCDGF

SEQ ID NO: 4038 - protein, 14 aa, synthetic construct
AYMKCSPAWMCEGF

SEQ ID NO: 4039 - protein, 14 aa, synthetic construct
PYAVCVPKWMCSGF

SEQ ID NO: 4040 - protein, 14 aa, synthetic construct
EEKLCKPAWMCEWF

SEQ ID NO: 4041 - protein, 14 aa, synthetic construct
DVLMCTPRWMCDGF

SEQ ID NO: 4042 - protein, 14 aa, synthetic construct
TLFACVPAWMCDGF

SEQ ID NO: 4043 - protein, 14 aa, synthetic construct
IDRHCVPRWMCDGL

SEQ ID NO: 4044 - protein, 14 aa, synthetic construct
ESRLCVPTWMCTWL

SEQ ID NO: 4045 - protein, 14 aa, synthetic construct
DYSVCRPAWMCQGF

SEQ ID NO: 4046 - protein, 14 aa, synthetic construct
FTARCEPSWMCVGF

SEQ ID NO: 4047 - protein, 14 aa, synthetic construct
LYKECVPQWMCSGF

SEQ ID NO: 4048 - protein, 14 aa, synthetic construct
TGMACVPWWMCEGF

SEQ ID NO: 4049 - protein, 14 aa, synthetic construct
ADVRCVPDWMCWGM

SEQ ID NO: 4050 - protein, 14 aa, synthetic construct
ELPVCRPSWMCGGL

SEQ ID NO: 4051 - protein, 14 aa, synthetic construct
QVKYCIPEWMCSSF

SEQ ID NO: 4052 - protein, 14 aa, synthetic construct
FTAQCVPLWMCLGF

SEQ ID NO: 4053 - protein, 14 aa, synthetic construct
VSHHCVPAWMCFGL

SEQ ID NO: 4054 - protein, 14 aa, synthetic construct
HSVHCVPMWMCTGF

SEQ ID NO: 4055 - protein, 14 aa, synthetic construct
VNRMCVPVWMCQGF

SEQ ID NO: 4056 - protein, 14 aa, synthetic construct
LLLRCEPTWMCTGF

SEQ ID NO: 4057 - protein, 14 aa, synthetic construct
WTPLCKPLWMCQGL

SEQ ID NO: 4058 - protein, 14 aa, synthetic construct
YSISCVPQWMCEGF

SEQ ID NO: 4059 - protein, 14 aa, synthetic construct
VQPWCVPSWMCERF

SEQ ID NO: 4060 - protein, 14 aa, synthetic construct
PGKVCEPIWMCLGF

SEQ ID NO: 4061 - protein, 14 aa, synthetic construct
WIKECVPDWMCSGF

SEQ ID NO: 4062 - protein, 14 aa, synthetic construct
VMPRCEPIWMCRGF

SEQ ID NO: 4063 - protein, 14 aa, synthetic construct
MEPVCLPEWMCWGF

SEQ ID NO: 4064 - protein, 14 aa, synthetic construct
QSVMCRPAWMCEGF

SEQ ID NO: 4065 - protein, 14 aa, synthetic construct
VPALCVPNWMCSGL

SEQ ID NO: 4066 - protein, 14 aa, synthetic construct
EQPACVPKWMCIGF

SEQ ID NO: 4067 - protein, 14 aa, synthetic construct
ETPRCVPWWMCIDI

SEQ ID NO: 4068 - protein, 14 aa, synthetic construct
NSSLCIPSWMCSGF

SEQ ID NO: 4069 - protein, 14 aa, synthetic construct
FELYCVPAWMCSGF

SEQ ID NO: 4070 - protein, 14 aa, synthetic construct
EAKVCKPAWMCDGL

SEQ ID NO: 4071 - protein, 14 aa, synthetic construct
EEMMCKPDWMCYGF

SEQ ID NO: 4072 - protein, 14 aa, synthetic construct
YHKECIPPWMCMGF

SEQ ID NO: 4073 - protein, 14 aa, synthetic construct
TIMYCKPTWMCTGF

SEQ ID NO: 4074 - protein, 14 aa, synthetic construct
YETVCKPLWMCTGF

SEQ ID NO: 4075 - protein, 14 aa, synthetic construct
DVGMCRPKWMCDGF

SEQ ID NO: 4076 - protein, 14 aa, synthetic construct
VLPSCIPSWMCNGF

SEQ ID NO: 4077 - protein, 14 aa, synthetic construct
EVVACVPEWMCVGF

SEQ ID NO: 4078 - protein, 14 aa, synthetic construct
LVHLCKPPWMCHGF

SEQ ID NO: 4079 - protein, 14 aa, synthetic construct
DQRECIPHWMCAGF

SEQ ID NO: 4080 - protein, 14 aa, synthetic construct
ENRMCIPEWMCQAS

SEQ ID NO: 4081 - protein, 14 aa, synthetic construct
MVIECRPEWMCVGF

SEQ ID NO: 4082 - protein, 14 aa, synthetic construct
LYGVCVPEWMCHGF

SEQ ID NO: 4083 - protein, 14 aa, synthetic construct
VVRVCEPSWMCAGF

SEQ ID NO: 4084 - protein, 14 aa, synthetic construct
SEPVCTPMWMCTGI

SEQ ID NO: 4085 - protein, 14 aa, synthetic construct
GSPFCVPLWMCEGF

SEQ ID NO: 4086 - protein, 14 aa, synthetic construct
TTPMCVPAWMCSGM

SEQ ID NO: 4087 - protein, 14 aa, synthetic construct
GNIWCEPAWMCVGF

SEQ ID NO: 4088 - protein, 14 aa, synthetic construct
GLRMCEPMWMCQGF

SEQ ID NO: 4089 - protein, 14 aa, synthetic construct
VHRMCEPKWMCEGF

SEQ ID NO: 4090 - protein, 14 aa, synthetic construct
WEGFCVPTWMCDGF

SEQ ID NO: 4091 - protein, 14 aa, synthetic construct
VQLMCMPEWMCSGL

SEQ ID NO: 4092 - protein, 14 aa, synthetic construct
PVQLCIPSWMCDGF

SEQ ID NO: 4093 - protein, 14 aa, synthetic construct
ISPICRPAWMCHGF

SEQ ID NO: 4094 - protein, 14 aa, synthetic construct
VTTLCRPAWMCHGF

SEQ ID NO: 4095 - protein, 14 aa, synthetic construct
EYQRCIPEWMCSGF

SEQ ID NO: 4096 - protein, 14 aa, synthetic construct
HMPLCIPVWMCAGF

SEQ ID NO: 4097 - protein, 14 aa, synthetic construct
LVARCVPEWMCAGF

SEQ ID NO: 4098 - protein, 14 aa, synthetic construct
YSNFCVPHWMCSGF

SEQ ID NO: 4099 - protein, 14 aa, synthetic construct
VEVRCVPAWMCEGL

SEQ ID NO: 4100 - protein, 14 aa, synthetic construct
PGASCVPAWMCDGF

SEQ ID NO: 4101 - protein, 14 aa, synthetic construct
SVVKCVPSWMCTGF

SEQ ID NO: 4102 - protein, 14 aa, synthetic construct
EMIRCEPRWMCSGF

SEQ ID NO: 4103 - protein, 14 aa, synthetic construct
LKVECRPLWMCEGF

SEQ ID NO: 4104 - protein, 14 aa, synthetic construct
MLRSCVPPWMCAGF

SEQ ID NO: 4105 - protein, 14 aa, synthetic construct
EQVLCRPEWMCIGF

SEQ ID NO: 4106 - protein, 14 aa, synthetic construct
VSQLCIPEWMCIGI

SEQ ID NO: 4107 - protein, 14 aa, synthetic construct
VHMACTPWWMCVGF

SEQ ID NO: 4108 - protein, 14 aa, synthetic construct
HMQYCIPQWMCHGF

SEQ ID NO: 4109 - protein, 14 aa, synthetic construct
FAFDCVPKWMCTGF

SEQ ID NO: 4110 - protein, 14 aa, synthetic construct
TVKQCVPEWMCVML

SEQ ID NO: 4111 - protein, 14 aa, synthetic construct
DLIYCRPAWMCDGF

SEQ ID NO: 4112 - protein, 14 aa, synthetic construct
MERSCIPDWMCLGF

SEQ ID NO: 4113 - protein, 14 aa, synthetic construct
VEYLCKPVWMCQGF

SEQ ID NO: 4114 - protein, 14 aa, synthetic construct
MSMYCVPTWMCNGF

SEQ ID NO: 4115 - protein, 14 aa, synthetic construct
LELACRPMWMCQGF

SEQ ID NO: 4116 - protein, 14 aa, synthetic construct
LELLCRPSWMCEGF

SEQ ID NO: 4117 - protein, 14 aa, synthetic construct
EWLVCKPAWMCLGL

SEQ ID NO: 4118 - protein, 14 aa, synthetic construct
EVLRCVPRWMCEKF

SEQ ID NO: 4119 - protein, 14 aa, synthetic construct
GGPMCKPVWMCQGF

SEQ ID NO: 4120 - protein, 14 aa, synthetic construct
IRALCEPSWMCTGF

SEQ ID NO: 4121 - protein, 14 aa, synthetic construct
HMIHCVPDWMCEGF

SEQ ID NO: 4122 - protein, 14 aa, synthetic construct
DQAACVPAWMCTGF

SEQ ID NO: 4123 - protein, 14 aa, synthetic construct
VVSHCKPIWMCSGF

SEQ ID NO: 4124 - protein, 14 aa, synthetic construct
LGVQCKPTWMCQGF

SEQ ID NO: 4125 - protein, 14 aa, synthetic construct
DARLCKPTWMCMGL

SEQ ID NO: 4126 - protein, 14 aa, synthetic construct
GDQMCIPLWMCEGF

SEQ ID NO: 4127 - protein, 14 aa, synthetic construct
SFQRCEPEWMCYGF

SEQ ID NO: 4128 - protein, 14 aa, synthetic construct
AYPMCSPAWMCAGF

SEQ ID NO: 4129 - protein, 14 aa, synthetic construct
YTAMCVPVWMCNVL

SEQ ID NO: 4130 - protein, 14 aa, synthetic construct
EFKWCVPDWMCYGV

SEQ ID NO: 4131 - protein, 14 aa, synthetic construct
ASISCIPDWMCHGF

SEQ ID NO: 4132 - protein, 14 aa, synthetic construct
LDLSCVPAWMCTGF

SEQ ID NO: 4133 - protein, 14 aa, synthetic construct
ATVVCSPPWMCTGF

SEQ ID NO: 4134 - protein, 14 aa, synthetic construct
ENAKCSPAWMCVGF

SEQ ID NO: 4135 - protein, 14 aa, synthetic construct
VHIMCVPPWMCERF

SEQ ID NO: 4136 - protein, 14 aa, synthetic construct
LLERCVPSWMCLGF

SEQ ID NO: 4137 - protein, 14 aa, synthetic construct
PQIWCVPTWMCAAS

SEQ ID NO: 4138 - protein, 14 aa, synthetic construct
QEPVCRPAWMCSGF

SEQ ID NO: 4139 - protein, 14 aa, synthetic construct
QVKYCEPQWMCAGL

SEQ ID NO: 4140 - protein, 14 aa, synthetic construct
EAPYCRPSWMCAGF

SEQ ID NO: 4141 - protein, 14 aa, synthetic construct
PGMVCKPSWMCSHL

SEQ ID NO: 4142 - protein, 14 aa, synthetic construct
VQHWCVPAWMCYGL

SEQ ID NO: 4143 - protein, 14 aa, synthetic construct
VDRMCVPPWMCDVL

SEQ ID NO: 4144 - protein, 14 aa, synthetic construct
IDRHCIPAWMCEQF

SEQ ID NO: 4145 - protein, 14 aa, synthetic construct
PEIRCAPLWMCVGF

SEQ ID NO: 4146 - protein, 14 aa, synthetic construct
PPRACVPSWMCTGF

SEQ ID NO: 4147 - protein, 14 aa, synthetic construct
GMKTCVPAWMCVGF

SEQ ID NO: 4148 - protein, 14 aa, synthetic construct
TSVLCQPLWMCSGF

SEQ ID NO: 4149 - protein, 14 aa, synthetic construct
VGIRCEPAWMCEGF

SEQ ID NO: 4150 - protein, 14 aa, synthetic construct
VDRVCIPTWMCEGI

SEQ ID NO: 4151 - protein, 14 aa, synthetic construct
FWQRCVPTWMCEGF

SEQ ID NO: 4152 - protein, 14 aa, synthetic construct
VLHKCLPTWMCNGF

SEQ ID NO: 4153 - protein, 14 aa, synthetic construct
DPVWCIPQWMCEGF

SEQ ID NO: 4154 - protein, 14 aa, synthetic construct
SDYMCRPSWMCEGL

SEQ ID NO: 4155 - protein, 14 aa, synthetic construct
NYNACVPIWMCEGF

SEQ ID NO: 4156 - protein, 14 aa, synthetic construct
PYSICKPDWMCTGL

SEQ ID NO: 4157 - protein, 14 aa, synthetic construct
SEMRCSPPWMCYGF

SEQ ID NO: 4158 - protein, 14 aa, synthetic construct
LYEMCKPLWMCAGF

SEQ ID NO: 4159 - protein, 14 aa, synthetic construct
PFLACIPQWMCEVV

SEQ ID NO: 4160 - protein, 14 aa, synthetic construct
SDMVCKPPWMCYGF

SEQ ID NO: 4161 - protein, 14 aa, synthetic construct
SGLSCVPFWMCTGF

SEQ ID NO: 4162 - protein, 14 aa, synthetic construct
YNQLCIPNWMCTGF

SEQ ID NO: 4163 - protein, 14 aa, synthetic construct
ELRLCVPHWMCDGF

SEQ ID NO: 4164 - protein, 14 aa, synthetic construct
VPRLCMPPWMCVGF

SEQ ID NO: 4165 - protein, 14 aa, synthetic construct
WDIRCSPEWMCIGL

SEQ ID NO: 4166 - protein, 14 aa, synthetic construct
EPKECVPPWMCIGM

SEQ ID NO: 4167 - protein, 14 aa, synthetic construct
WQAWCEPPWMCLGF

SEQ ID NO: 4168 - protein, 14 aa, synthetic construct
DQRMCEPSWMCLGL

SEQ ID NO: 4169 - protein, 14 aa, synthetic construct
VVHLCTPNWMCNGF

SEQ ID NO: 4170 - protein, 14 aa, synthetic construct
VSKMCSPVWMCEGF

SEQ ID NO: 4171 - protein, 14 aa, synthetic construct
NYVKCRPAWMCDGF

SEQ ID NO: 4172 - protein, 14 aa, synthetic construct
YELACVPRWMCYGL

SEQ ID NO: 4173 - protein, 14 aa, synthetic construct
SDHLCIPRWMCVGF

SEQ ID NO: 4174 - protein, 14 aa, synthetic construct
GSHYCVPQWMCGGF

SEQ ID NO: 4175 - protein, 14 aa, synthetic construct
EHARCTPAWMCAGF

SEQ ID NO: 4176 - protein, 14 aa, synthetic construct
IESICRPAWMCERL

SEQ ID NO: 4177 - protein, 14 aa, synthetic construct
VQIVCSPTWMCTGF

SEQ ID NO: 4178 - protein, 14 aa, synthetic construct
PSQMCVPTWMCVGF

SEQ ID NO: 4179 - protein, 14 aa, synthetic construct
QLGACIPWWMCNGF

SEQ ID NO: 4180 - protein, 14 aa, synthetic construct
NAGYCVPTWMCDGF

SEQ ID NO: 4181 - protein, 14 aa, synthetic construct
MGVECKPLWMCTGL

SEQ ID NO: 4182 - protein, 14 aa, synthetic construct
GQGSCVPMWMCEGF

SEQ ID NO: 4183 - protein, 14 aa, synthetic construct
LSWECVPQWMCTGL

SEQ ID NO: 4184 - protein, 14 aa, synthetic construct
PYTLCRPAWMCQAM

SEQ ID NO: 4185 - protein, 14 aa, synthetic construct
LEIFCVPMWMCEGL

SEQ ID NO: 4186 - protein, 14 aa, synthetic construct
AVIMCEPSWMCEGF

SEQ ID NO: 4187 - protein, 14 aa, synthetic construct
EGILCKPSWMCNDF

SEQ ID NO: 4188 - protein, 14 aa, synthetic construct
STMLCSPSWMCFGF

SEQ ID NO: 4189 - protein, 14 aa, synthetic construct
LQQLCVPNWMCVGF

SEQ ID NO: 4190 - protein, 14 aa, synthetic construct
YDRLCSPPWMCSGF

SEQ ID NO: 4191 - protein, 14 aa, synthetic construct
PQIKCIPAWMCDGF

SEQ ID NO: 4192 - protein, 14 aa, synthetic construct
SNVMCRPSWMCAGF

SEQ ID NO: 4193 - protein, 14 aa, synthetic construct
EDALCVPQWMCSGF

SEQ ID NO: 4194 - protein, 14 aa, synthetic construct
TAPMCNPPWMCYGL

SEQ ID NO: 4195 - protein, 14 aa, synthetic construct
VTPACMPRWMCEGF

SEQ ID NO: 4196 - protein, 14 aa, synthetic construct
IEKQCVPQWMCDGF

SEQ ID NO: 4197 - protein, 14 aa, synthetic construct
ESKLCIPDWMCILL

SEQ ID NO: 4198 - protein, 14 aa, synthetic construct
MDVWCVPQWMCDGF

SEQ ID NO: 4199 - protein, 14 aa, synthetic construct
VDYVCRPSWMCSGI

SEQ ID NO: 4200 - protein, 14 aa, synthetic construct
TEPACVPPWMCVGW

SEQ ID NO: 4201 - protein, 14 aa, synthetic construct
GMVRCVPDWMCYGF

SEQ ID NO: 4202 - protein, 14 aa, synthetic construct
TEHQCVPAWMCGGF

SEQ ID NO: 4203 - protein, 14 aa, synthetic construct
ILRHCTPEWMCIGL

SEQ ID NO: 4204 - protein, 14 aa, synthetic construct
LQIRCQPVWMCHGF

SEQ ID NO: 4205 - protein, 14 aa, synthetic construct
IDTLCVPWWMCSGF

SEQ ID NO: 4206 - protein, 14 aa, synthetic construct
DQHACRPEWMCVGF

SEQ ID NO: 4207 - protein, 14 aa, synthetic construct
VVYTCVPSWMCTGL

SEQ ID NO: 4208 - protein, 14 aa, synthetic construct
DYWYCQPAWMCTGL

SEQ ID NO: 4209 - protein, 14 aa, synthetic construct
LVPRCLPEWMCTGF

SEQ ID NO: 4210 - protein, 14 aa, synthetic construct
DLQMCLPKWMCVGF

SEQ ID NO: 4211 - protein, 14 aa, synthetic construct
EWIMCTPPWMCHGF

SEQ ID NO: 4212 - protein, 14 aa, synthetic construct
PDVHCVPRWMCDGL

SEQ ID NO: 4213 - protein, 14 aa, synthetic construct
LTLKCAPAWMCNGF

SEQ ID NO: 4214 - protein, 14 aa, synthetic construct
ESQYCVPRWMCDGF

SEQ ID NO: 4215 - protein, 14 aa, synthetic construct
FERVCVPAWMCAGF

SEQ ID NO: 4216 - protein, 14 aa, synthetic construct
GNDYCVPAWMCAGF

SEQ ID NO: 4217 - protein, 14 aa, synthetic construct
YVMMCVPQWMCTAK

SEQ ID NO: 4218 - protein, 14 aa, synthetic construct
GHMYCSPLWMCEGF

SEQ ID NO: 4219 - protein, 14 aa, synthetic construct
LGPMCRPNWMCVGL

SEQ ID NO: 4220 - protein, 14 aa, synthetic construct
GYHLCIPEWMCSGL

SEQ ID NO: 4221 - protein, 14 aa, synthetic construct
ADVLCRPHWMCAGF

SEQ ID NO: 4222 - protein, 14 aa, synthetic construct
SDALCRPHWMCAGF

SEQ ID NO: 4223 - protein, 14 aa, synthetic construct
SLERCEPPWMCFGF

SEQ ID NO: 4224 - protein, 14 aa, synthetic construct
TERMCSPSWMCDGF

SEQ ID NO: 4225 - protein, 14 aa, synthetic construct
VMAVCQPEWMCSGM

SEQ ID NO: 4226 - protein, 14 aa, synthetic construct
VIPLCRPSWMCAAY

SEQ ID NO: 4227 - protein, 14 aa, synthetic construct
ESRACVPNWMCHGL

SEQ ID NO: 4228 - protein, 14 aa, synthetic construct
ATVRCMPMWMCHGF

SEQ ID NO: 4229 - protein, 14 aa, synthetic construct
QNFHCVPQWMCDWL

SEQ ID NO: 4230 - protein, 14 aa, synthetic construct
FGVKCEPRWMCNGF

SEQ ID NO: 4231 - protein, 14 aa, synthetic construct
YQMLCVPEWMCSGL

SEQ ID NO: 4232 - protein, 14 aa, synthetic construct
STTLCRPAWMCTGM

SEQ ID NO: 4233 - protein, 14 aa, synthetic construct
DRVLCTPTWMCEGF

SEQ ID NO: 4234 - protein, 14 aa, synthetic construct
AQKLCEPMWMCVGF

SEQ ID NO: 4235 - protein, 14 aa, synthetic construct
MSPMCSPSWMCMGF

SEQ ID NO: 4236 - protein, 14 aa, synthetic construct
AQVLCVPNWMCTGF

SEQ ID NO: 4237 - protein, 14 aa, synthetic construct
GQIMCIPTWMCSGF

SEQ ID NO: 4238 - protein, 14 aa, synthetic construct
GAYTCVPAWMCQGF

SEQ ID NO: 4239 - protein, 14 aa, synthetic construct
IEAQCRPVWMCHGF

SEQ ID NO: 4240 - protein, 14 aa, synthetic construct
YNQYCTPLWMCEGF

SEQ ID NO: 4241 - protein, 14 aa, synthetic construct
NERFCEPAWMCHGF

SEQ ID NO: 4242 - protein, 14 aa, synthetic construct
VERFCEPAWMCIGL

SEQ ID NO: 4243 - protein, 14 aa, synthetic construct
SMQKCVPSWMCAGF

SEQ ID NO: 4244 - protein, 14 aa, synthetic construct
WDLLCSPPWMCAGM

SEQ ID NO: 4245 - protein, 14 aa, synthetic construct
TWSICEPRWMCEGF

SEQ ID NO: 4246 - protein, 14 aa, synthetic construct
QLLRCVPPWMCEGF

SEQ ID NO: 4247 - protein, 14 aa, synthetic construct
PTIMCIPVWMCQAF

SEQ ID NO: 4248 - protein, 14 aa, synthetic construct
LNVECVPQWMCDGF

SEQ ID NO: 4249 - protein, 14 aa, synthetic construct
YTQACTPSWMCHGF

SEQ ID NO: 4250 - protein, 14 aa, synthetic construct
DIVECRPRWMCDGF

SEQ ID NO: 4251 - protein, 14 aa, synthetic construct
PGFWCQPKWMCEGF

SEQ ID NO: 4252 - protein, 14 aa, synthetic construct
WVRLCQPAWMCTGL

SEQ ID NO: 4253 - protein, 14 aa, synthetic construct
LTPVCRPAWMCLEL

SEQ ID NO: 4254 - protein, 14 aa, synthetic construct
MQDFCKPLWMCSGF

SEQ ID NO: 4255 - protein, 14 aa, synthetic construct
YARECIPQWMCGGF

SEQ ID NO: 4256 - protein, 14 aa, synthetic construct
PLTSCVPQWMCYGF

SEQ ID NO: 4257 - protein, 14 aa, synthetic construct
LVRMCQPPWMCDGF

SEQ ID NO: 4258 - protein, 14 aa, synthetic construct
GDIQCRPLWMCDGL

SEQ ID NO: 4259 - protein, 14 aa, synthetic construct
DQVMCIPRWMCEGF

SEQ ID NO: 4260 - protein, 14 aa, synthetic construct
EFRECRPPWMCQGL

SEQ ID NO: 4261 - protein, 14 aa, synthetic construct
DSLVCQPRWMCVGF

SEQ ID NO: 4262 - protein, 14 aa, synthetic construct
STMSCVPSWMCLGF

SEQ ID NO: 4263 - protein, 14 aa, synthetic construct
TQVKCIPLWMCDGF

SEQ ID NO: 4264 - protein, 14 aa, synthetic construct
LTVYCTPEWMCSGW

SEQ ID NO: 4265 - protein, 14 aa, synthetic construct
GWVGCVPLWMCEGF

SEQ ID NO: 4266 - protein, 14 aa, synthetic construct
ILPRCEPYWMCTGL

SEQ ID NO: 4267 - protein, 14 aa, synthetic construct
TVRSCTPPWMCEGF

SEQ ID NO: 4268 - protein, 14 aa, synthetic construct
AVHMCAPSWMCSGF

SEQ ID NO: 4269 - protein, 14 aa, synthetic construct
GLPQCVPPWMCDGF

SEQ ID NO: 4270 - protein, 14 aa, synthetic construct
FFQVCEPQWMCLGF

SEQ ID NO: 4271 - protein, 14 aa, synthetic construct
YERVCVPSWMCNSL

SEQ ID NO: 4272 - protein, 14 aa, synthetic construct
DVLMCKPEWMCLGY

SEQ ID NO: 4273 - protein, 14 aa, synthetic construct
TIQWCEPLWMCRGF

SEQ ID NO: 4274 - protein, 14 aa, synthetic construct
TAPWCQPRWMCDGF

SEQ ID NO: 4275 - protein, 14 aa, synthetic construct
AEMLCVPPWMCKAF

SEQ ID NO: 4276 - protein, 14 aa, synthetic construct
EGGYCVPTWMCSGF

SEQ ID NO: 4277 - protein, 14 aa, synthetic construct
LVSWCTPPWMCEGV

SEQ ID NO: 4278 - protein, 14 aa, synthetic construct
FDGWCVPAWMCYPF

SEQ ID NO: 4279 - protein, 14 aa, synthetic construct
ISAECRPPWMCIGF

SEQ ID NO: 4280 - protein, 14 aa, synthetic construct
ITRMCTPSWMCMSF

SEQ ID NO: 4281 - protein, 14 aa, synthetic construct
MATMCVPQWMCAGF

SEQ ID NO: 4282 - protein, 14 aa, synthetic construct
GSVFCIPTWMCEQS

SEQ ID NO: 4283 - protein, 14 aa, synthetic construct
GGVMCRPMWMCAGF

SEQ ID NO: 4284 - protein, 14 aa, synthetic construct
EIGACVPDWMCRGF

SEQ ID NO: 4285 - protein, 14 aa, synthetic construct
STLLCTPEWMCFGM

SEQ ID NO: 4286 - protein, 14 aa, synthetic construct
SYMRCEPEWMCSGL

SEQ ID NO: 4287 - protein, 14 aa, synthetic construct
VQTRCVPAWMCDGF

SEQ ID NO: 4288 - protein, 14 aa, synthetic construct
DARLCTPLWMCTGF

SEQ ID NO: 4289 - protein, 14 aa, synthetic construct
QMSMCKPAWMCTGL

SEQ ID NO: 4290 - protein, 14 aa, synthetic construct
QQVRCVPDWMCSGF

SEQ ID NO: 4291 - protein, 14 aa, synthetic construct
EAKWCTPQWMCGGF

SEQ ID NO: 4292 - protein, 14 aa, synthetic construct
PAQICMPAWMCHGF

SEQ ID NO: 4293 - protein, 14 aa, synthetic construct
DARMCIPMWMCQAF

SEQ ID NO: 4294 - protein, 14 aa, synthetic construct
GFRTCVPSWMCTGF

SEQ ID NO: 4295 - protein, 14 aa, synthetic construct
LSVECIPVWMCNGF

SEQ ID NO: 4296 - protein, 14 aa, synthetic construct
EYRECVPDWMCSGF

SEQ ID NO: 4297 - protein, 14 aa, synthetic construct
VVVQCIPEWMCNGF

SEQ ID NO: 4298 - protein, 14 aa, synthetic construct
SYQLCKPEWMCHGW

SEQ ID NO: 4299 - protein, 14 aa, synthetic construct
YERMCSPEWMCWDF

SEQ ID NO: 4300 - protein, 14 aa, synthetic construct
KHILCEPVWMCVGF

SEQ ID NO: 4301 - protein, 14 aa, synthetic construct
VENLCRPSWMCEGF

SEQ ID NO: 4302 - protein, 14 aa, synthetic construct
NGPMCVPQWMCDGT

SEQ ID NO: 4303 - protein, 14 aa, synthetic construct
HVQRCVPQWMCVGF

SEQ ID NO: 4304 - protein, 14 aa, synthetic construct
STPYCVPDWMCAGF

SEQ ID NO: 4305 - protein, 14 aa, synthetic construct
MTDRCKPEWMCFGF

SEQ ID NO: 4306 - protein, 14 aa, synthetic construct
LLIVCKPPWMCAGS

SEQ ID NO: 4307 - protein, 14 aa, synthetic construct
SVMNCVPLRMCEGF

SEQ ID NO: 4308 - protein, 14 aa, synthetic construct
VFKMCVPMWMCQVS

SEQ ID NO: 4309 - protein, 14 aa, synthetic construct
IAVKCMPAWMCVGI

SEQ ID NO: 4310 - protein, 14 aa, synthetic construct
EWPICRPSWMCDDF

SEQ ID NO: 4311 - protein, 14 aa, synthetic construct
MDVWCVPTWMCQHL

SEQ ID NO: 4312 - protein, 14 aa, synthetic construct
GTQACVPLWMCEGI

SEQ ID NO: 4313 - protein, 14 aa, synthetic construct
VQPWCVPAWMCDGL

SEQ ID NO: 4314 - protein, 14 aa, synthetic construct
QMITCQPKWMCEGF

SEQ ID NO: 4315 - protein, 14 aa, synthetic construct
VQRVCVPTWMCDVF

SEQ ID NO: 4316 - protein, 14 aa, synthetic construct
QEMTCVPRWMCSGF

SEQ ID NO: 4317 - protein, 14 aa, synthetic construct
DGLICQPSWMCTGL

SEQ ID NO: 4318 - protein, 14 aa, synthetic construct
MTNMCRPSWMCAVF

SEQ ID NO: 4319 - protein, 14 aa, synthetic construct
DIEVCRPHWMCEGF

SEQ ID NO: 4320 - protein, 14 aa, synthetic construct
EVKKCVPAWMCESQ

SEQ ID NO: 4321 - protein, 14 aa, synthetic construct
LTSWCVPQWMCDGL

SEQ ID NO: 4322 - protein, 14 aa, synthetic construct
HVTMCSPNWMCWGL

SEQ ID NO: 4323 - protein, 14 aa, synthetic construct
PTSFCRPPWMCEGL

SEQ ID NO: 4324 - protein, 14 aa, synthetic construct
IMQRCEPLWMCSGL

SEQ ID NO: 4325 - protein, 14 aa, synthetic construct
GPKLCLPMWMCQGF

SEQ ID NO: 4326 - protein, 14 aa, synthetic construct
FEVRCVPTWMCAGQ

SEQ ID NO: 4327 - protein, 14 aa, synthetic construct
GWRQCEPVWMCSGF

SEQ ID NO: 4328 - protein, 14 aa, synthetic construct
MRSVCVPSWMCSGF

SEQ ID NO: 4329 - protein, 14 aa, synthetic construct
APRMCSPPWMCYEL

SEQ ID NO: 4330 - protein, 638 aa, synthetic construct; identical to SEQ ID NO: 159

SEQ ID NO: 4331 - protein, 226 aa, synthetic construct; identical to SEQ ID NO: 20

SEQ ID NO: 4332 - protein, 629 aa, synthetic construct
EVQLVESGGGLVQPGNSLRLSCAASGFTFSSFGMSWVRQAPGKGLEWVSSISGSGSDTLYADSVKGRFTISRDNAKTTLYLQMNSLRPEDTAVYYCTIGGSLSRSSQGTLVTVSSGGGGSGGGSGGIDWCPRYLWDECYNAGSGGSGGLSGRSDAGSPLGLAGSGGGSQVQLVQSGAEVKKPGASVKVSCKASGYTFTSYYIHWVRQAPGQGLEWIGSIYPGNVNTNYNEKFKDRATLTVDTSISTAYMELSRLRSDDTAVYFCTRSHYGLDWNFDVWGQGTTVTVSSGGGGSGGGGSGGGGSDIQMTQSPSSLSASVGDRVTITCHASQNIYVWLNWYQQKPGKAPKLLIYKASNLHTGVPSRFSGSGSGTDFTLTISSLQPEDFATYYCQQGQTYPYTFGGGTKVEIKGGGGSDIQMTQSPSSLSASVGDRVTITCRASQGISNYLAWYQQKTGKVPKFLIYEASTLQSGVPSRFSGGGSGTDFTLTISSLQPEDVATYYCQNYNSAPFTFGPGTKVDIKRTVAAPSVFIFPPSDEQLKSGTASVVCLLNNFYPREAKVQWKVDNALQSGNSQESVTEQDSKDSTYSLSSTLTLSKADYEKHKVYACEVTHQGLSSPVTKSFNRGEC

SEQ ID NO: 4333 - protein, 226 aa, synthetic construct; identical to SEQ ID NO: 20

SEQ ID NO: 4334 - protein, 629 aa, synthetic construct
EVQLVESGGGLVQPGNSLRLSCAASGFTFSSFGMSWVRQAPGKGLEWVSSISGSGSDTLYADSVKGRFTISRDNAKTTLYLQMNSLRPEDTAVYYCTIGGSLSRSSQGTLVTVSSGGGGSGGGSGGMDWCPRDLWVHCFAGSSGGSGGLSGRSDAGSPLGLAGSGGGSQVQLVQSGAEVKKPGASVKVSCKASGYTFTSYYIHWVRQAPGQGLEWIGSIYPGNVNTNYNEKFKDRATLTVDTSISTAYMELSRLRSDDTAVYFCTRSHYGLDWNFDVWGQGTTVTVSSGGGGSGGGGSGGGGSDIQMTQSPSSLSASVGDRVTITCHASQNIYVWLNWYQQKPGKAPKLLIYKASNLHTGVPSRFSGSGSGTDFTLTISSLQPEDFATYYCQQGQTYPYTFGGGTKVEIKGGGGSDIQMTQSPSSLSASVGDRVTITCRASQGISNYLAWYQQKTGKVPKFLIYEASTLQSGVPSRFSGGGSGTDFTLTISSLQPEDVATYYCQNYNSAPFTFGPGTKVDIKRTVAAPSVFIFPPSDEQLKSGTASVVCLLNNFYPREAKVQWKVDNALQSGNSQESVTEQDSKDSTYSLSSTLTLSKADYEKHKVYACEVTHQGLSSPVTKSFNRGEC

SEQ ID NO: 4335 - protein, 226 aa, synthetic construct; identical to SEQ ID NO: 20

SEQ ID NO: 4336 - protein, 638 aa, synthetic construct
EVQLVESGGGLVQPGGSLRLSCAASGSTFYTAVMGWVRQAPGKGLEWVAAIRWTALTTSYADSVKGRFTISRDGAKTTLYLQMNSLRPEDTAVYYCAARGTLGLFTTADSYDYWGQGTLVTVSSGGGGSGGGSGGIDWCPRYLWDECYNAGSGGSGGLSGRSDAGSPLGLAGSGGGSDIQMTQSPSSLSASVGDRVTITCHASQNIYVWLNWYQQKPGKAPKLLIYKASNLHTGVPSRFSGSGSGTDFTLTISSLQPEDFATYYCQQGQTYPYTFGGGTKVEIKGGGGSGGGGSGGGGSQVQLVQSGAEVKKPGASVKVSCKASGYTFTSYYIHWVRQAPGQGLEWIGSIYPGNVNTNYNEKFKDRATLTVDTSISTAYMELSRLRSDDTAVYFCTRSHYGLDWNFDVWGQGTTVTVSSGGGGSDIQMTQSPSSLSASVGDRVTITCRASQGISNYLAWYQQKTGKVPKFLIYEASTLQSGVPSRFSGGGSGTDFTLTISSLQPEDVATYYCQNYNSAPFTFGPGTKVDIKRTVAAPSVFIFPPSDEQLKSGTASVVCLLNNFYPREAKVQWKVDNALQSGNSQESVTEQDSKDSTYSLSSTLTLSKADYEKHKVYACEVTHQGLSSPVTKSFNRGEC

SEQ ID NO: 4337 - protein, 226 aa, synthetic construct; identical to SEQ ID NO: 20

SEQ ID NO: 4338 - protein, 638 aa, synthetic construct; identical to SEQ ID NO: 159

SEQ ID NO: 4339 - protein, 267 aa, synthetic construct
GGHVKLCKPAWMCQGLGGGSGGLSGRSDAGSPLGLAGSGGSQVQLVESGGGVVQPGRSLRLSCAASGFAFSRYGMHWVRQAPGKGLEWVAVIWYDGSNKYYADSVKGRFTISRDNSKNTQYLQMNSLRAEDTAVYYCARGGDFLYYYYYGMDVWGQGTTVTVSSASTKGPSVFPLAPSSKSTSGGTAALGCLVKDYFPEPVTVSWNSGALTSGVHTFPAVLQSSGLYSLSSVVTVPSSSLGTQTYICNVNHKPSNTKVDKKVEPKSC

SEQ ID NO: 4340 - protein, 638 aa, synthetic construct; identical to SEQ ID NO: 159

SEQ ID NO: 4341 - protein, 267 aa, synthetic construct
GGHVKLCKPAWMCQGLGGGSGGLSGRSDAGSPLGLAGSGGSQVQLVESGGGVVQPGRSLSLSCAASGFAFSRYGMHWVRQAPGKGLEWVAVIWYDGSNKYYADSVKGRFTISRDNSKNTQYLQMNSLRAEDTAVYYCARGGDFLYYYYYGMDVWGQGTTVTVSSASTKGPSVFPLAPSSKSTSGGTAALGCLVKDYFPEPVTVSWNSGALTSGVHTFPAVLQSSGLYSLSSVVTVPSSSLGTQTYICNVNHKPSNTKVDKKVEPKSC

SEQ ID NO: 4342 - protein, 629 aa, synthetic construct; identical to SEQ ID NO: 4334

SEQ ID NO: 4343 - protein, 267 aa, synthetic construct; identical to SEQ ID NO: 4339

SEQ ID NO: 4344 - protein, 629 aa, synthetic construct; identical to SEQ ID NO: 4334

SEQ ID NO: 4345 - protein, 267 aa, synthetic construct; identical to SEQ ID NO: 4341

SEQ ID NO: 4346 - protein, 628 aa, synthetic construct
LVQPGGSLRLSCAASGSTFYTAVMGWVRQAPGKGLEWVAAIRWTALTTSYADSVKGRFTISRDGAKTTLYLQMNSLRPEDTAVYYCAARGTLGLFTTADSYDYWGQGTLVTVSSGGGGSGGGSGGMDWCPRDLWVHCFAGSSGGSGGLSGRSDAGSPLGLAGSGGGSDIQMTQSPSSLSASVGDRVTITCHASQNIYVWLNWYQQKPGKAPKLLIYKASNLHTGVPSRFSGSGSGTDFTLTISSLQPEDFATYYCQQGQTYPYTFGGGTKVEIKGGGGSGGGGSGGGGSQVQLVQSGAEVKKPGASVKVSCKASGYTFTSYYIHWVRQAPGQGLEWIGSIYPGNVNTNYNEKFKDRATLTVDTSISTAYMELSRLRSDDTAVYFCTRSHYGLDWNFDVWGQGTTVTVSSGGGGSDIQMTQSPSSLSASVGDRVTITCRASQGISNYLAWYQQKTGKVPKFLIYEASTLQSGVPSRFSGGGSGTDFTLTISSLQPEDVATYYCQNYNSAPFTFGPGTKVDIKRTVAAPSVFIFPPSDEQLKSGTASVVCLLNNFYPREAKVQWKVDNALQSGNSQESVTEQDSKDSTYSLSSTLTLSKADYEKHKVYACEVTHQGLSSPVTKSFNRGEC

SEQ ID NO: 4347 - protein, 267 aa, synthetic construct; identical to SEQ ID NO: 4339

SEQ ID NO: 4348 - protein, 638 aa, synthetic construct; identical to SEQ ID NO: 163

SEQ ID NO: 4349 - protein, 267 aa, synthetic construct; identical to SEQ ID NO: 4341

SEQ ID NO: 4350 - protein, 629 aa, synthetic construct
EVQLVESGGGLVQPGNSLRLSCAASGFTFSSFGMSWVRQAPGKGLEWVSSISGSGSDTLYADSVKGRFTISRDNAKTTLYLQMNSLRPEDTAVYYCTIGGSLSRSSQGTLVTVSSGGGGSGGGSGGMDWCPRDLWVHCFAGSSGGSGGLSGRSDAGSPLGLAGSGGGSDIQMTQSPSSLSASVGDRVTITCHASQNIYVWLNWYQQKPGKAPKLLIYKASNLHTGVPSRFSGSGSGTDFTLTISSLQPEDFATYYCQQGQTYPYTFGGGTKVEIKGGGGSGGGGSGGGGSQVQLVQSGAEVKKPGASVKVSCKASGYTFTSYYIHWVRQAPGQGLEWIGSIYPGNVNTNYNEKFKDRATLTVDTSISTAYMELSRLRSDDTAVYFCTRSHYGLDWNFDVWGQGTTVTVSSGGGGSDIQMTQSPSSLSASVGDRVTITCRASQGISNYLAWYQQKTGKVPKFLIYEASTLQSGVPSRFSGGGSGTDFTLTISSLQPEDVATYYCQNYNSAPFTFGPGTKVDIKRTVAAPSVFIFPPSDEQLKSGTASVVCLLNNFYPREAKVQWKVDNALQSGNSQESVTEQDSKDSTYSLSSTLTLSKADYEKHKVYACEVTHQGLSSPVTKSFNRGEC

SEQ ID NO: 4351 - protein, 267 aa, synthetic construct; identical to SEQ ID NO: 4339

SEQ ID NO: 4352 - protein, 629 aa, synthetic construct; identical to SEQ ID NO: 4350

SEQ ID NO: 4353 - protein, 267 aa, synthetic construct; identical to SEQ ID NO: 4341

SEQ ID NO: 4354 - protein, 638 aa, synthetic construct; identical to SEQ ID NO: 159

SEQ ID NO: 4355 - protein, 267 aa, synthetic construct
GGVTKWCIPPWMCEVTGGGSGGLSGRSDAGSPLGLAGSGGSQVQLVESGGGVVQPGRSLRLSCAASGFAFSRYGMHWVRQAPGKGLEWVAVIWYDGSNKYYADSVKGRFTISRDNSKNTQYLQMNSLRAEDTAVYYCARGGDFLYYYYYGMDVWGQGTTVTVSSASTKGPSVFPLAPSSKSTSGGTAALGCLVKDYFPEPVTVSWNSGALTSGVHTFPAVLQSSGLYSLSSVVTVPSSSLGTQTYICNVNHKPSNTKVDKKVEPKSC

SEQ ID NO: 4356 - protein, 638 aa, synthetic construct; identical to SEQ ID NO: 159

SEQ ID NO: 4357 - protein, 267 aa, synthetic construct
GGVTKWCIPPWMCEVTGGGSGGLSGRSDAGSPLGLAGSGGSQVQLVESGGGVVQPGRSLSLSCAASGFAFSRYGMHWVRQAPGKGLEWVAVIWYDGSNKYYADSVKGRFTISRDNSKNTQYLQMNSLRAEDTAVYYCARGGDFLYYYYYGMDVWGQGTTVTVSSASTKGPSVFPLAPSSKSTSGGTAALGCLVKDYFPEPVTVSWNSGALTSGVHTFPAVLQSSGLYSLSSVVTVPSSSLGTQTYICNVNHKPSNTKVDKKVEPKSC

SEQ ID NO: 4358 - protein, 629 aa, synthetic construct; identical to SEQ ID NO: 4334

SEQ ID NO: 4359 - protein, 267 aa, synthetic construct; identical to SEQ ID NO: 4355

SEQ ID NO: 4360 - protein, 629 aa, synthetic construct; identical to SEQ ID NO: 4334

SEQ ID NO: 4361 - protein, 267 aa, synthetic construct; identical to SEQ ID NO: 4357

SEQ ID NO: 4362 - protein, 638 aa, synthetic construct; identical to SEQ ID NO: 163

SEQ ID NO: 4363 - protein, 267 aa, synthetic construct; identical to SEQ ID NO: 4355

SEQ ID NO: 4364 - protein, 638 aa, synthetic construct; identical to SEQ ID NO: 163

SEQ ID NO: 4365 - protein, 267 aa, synthetic construct; identical to SEQ ID NO: 4357

SEQ ID NO: 4366 - protein, 629 aa, synthetic construct; identical to SEQ ID NO: 4350

SEQ ID NO: 4367 - protein, 267 aa, synthetic construct; identical to SEQ ID NO: 4355

SEQ ID NO: 4368 - protein, 629 aa, synthetic construct; identical to SEQ ID NO: 4350

SEQ ID NO: 4369 - protein, 267 aa, synthetic construct; identical to SEQ ID NO: 4355

SEQ ID NO: 4370 - protein, 629 aa, synthetic construct; identical to SEQ ID NO: 4350

SEQ ID NO: 4371 - protein, 267 aa, synthetic construct; identical to SEQ ID NO: 4357

SEQ ID NO: 4372 - protein, 638 aa, synthetic construct; identical to SEQ ID NO: 159

SEQ ID NO: 4373 - protein, 267 aa, synthetic construct
GGGEKWCIPDWMCSGFGGGSGGLSGRSDAGSPLGLAGSGGSQVQLVESGGGVVQPGRSLRLSCAASGFAFSRYGMHWVRQAPGKGLEWVAVIWYDGSNKYYADSVKGRFTISRDNSKNTQYLQMNSLRAEDTAVYYCARGGDFLYYYYYGMDVWGQGTTVTVSSASTKGPSVFPLAPSSKSTSGGTAALGCLVKDYFPEPVTVSWNSGALTSGVHTFPAVLQSSGLYSLSSVVTVPSSSLGTQTYICNVNHKPSNTKVDKKVEPKSC

SEQ ID NO: 4374 - protein, 638 aa, synthetic construct; identical to SEQ ID NO: 159

SEQ ID NO: 4375 - protein, 267 aa, synthetic construct
GGGEKWCIPDWMCSGFGGGSGGLSGRSDAGSPLGLAGSGGSQVQLVESGGGVVQPGRSLSLSCAASGFAFSRYGMHWVRQAPGKGLEWVAVIWYDGSNKYYADSVKGRFTISRDNSKNTQYLQMNSLRAEDTAVYYCARGGDFLYYYYYGMDVWGQGTTVTVSSASTKGPSVFPLAPSSKSTSGGTAALGCLVKDYFPEPVTVSWNSGALTSGVHTFPAVLQSSGLYSLSSVVTVPSSSLGTQTYICNVNHKPSNTKVDKKVEPKSC

SEQ ID NO: 4376 - protein, 629 aa, synthetic construct; identical to SEQ ID NO: 4334

SEQ ID NO: 4377 - protein, 267 aa, synthetic construct; identical to SEQ ID NO: 4373

SEQ ID NO: 4378 - protein, 629 aa, synthetic construct; identical to SEQ ID NO: 4334

SEQ ID NO: 4379 - protein, 267 aa, synthetic construct; identical to SEQ ID NO: 4375

SEQ ID NO: 4380 - protein, 638 aa, synthetic construct; identical to SEQ ID NO: 163

SEQ ID NO: 4381 - protein, 267 aa, synthetic construct; identical to SEQ ID NO: 4373

SEQ ID NO: 4382 - protein, 638 aa, synthetic construct; identical to SEQ ID NO: 163

SEQ ID NO: 4383 - protein, 267 aa, synthetic construct; identical to SEQ ID NO: 4375

SEQ ID NO: 4384 - protein, 629 aa, synthetic construct; identical to SEQ ID NO: 4350

SEQ ID NO: 4385 - protein, 267 aa, synthetic construct; identical to SEQ ID NO: 4373

SEQ ID NO: 4386 - protein, 629 aa, synthetic construct; identical to SEQ ID NO: 4350

SEQ ID NO: 4387 - protein, 267 aa, synthetic construct; identical to SEQ ID NO: 4375

SEQ ID NO: 4388 - protein, 638 aa, synthetic construct; identical to SEQ ID NO: 159

SEQ ID NO: 4389 - protein, 267 aa, synthetic construct
GGVEKVCKPVWMCVGFGGGSGGLSGRSDAGSPLGLAGSGGSQVQLVESGGGVVQPGRSLRLSCAASGFAFSRYGMHWVRQAPGKGLEWVAVIWYDGSNKYYADSVKGRFTISRDNSKNTQYLQMNSLRAEDTAVYYCARGGDFLYYYYYGMDVWGQGTTVTVSSASTKGPSVFPLAPSSKSTSGGTAALGCLVKDYFPEPVTVSWNSGALTSGVHTFPAVLQSSGLYSLSSVVTVPSSSLGTQTYICNVNHKPSNTKVDKKVEPKSC

SEQ ID NO: 4390 - protein, 638 aa, synthetic construct; identical to SEQ ID NO: 159

SEQ ID NO: 4391 - protein, 267 aa, synthetic construct
GGVEKVCKPVWMCVGFGGGSGGLSGRSDAGSPLGLAGSGGSQVQLVESGGGVVQPGRSLSLSCAASGFAFSRYGMHWVRQAPGKGLEWVAVIWYDGSNKYYADSVKGRFTISRDNSKNTQYLQMNSLRAEDTAVYYCARGGDFLYYYYYGMDVWGQGTTVTVSSASTKGPSVFPLAPSSKSTSGGTAALGCLVKDYFPEPVTVSWNSGALTSGVHTFPAVLQSSGLYSLSSVVTVPSSSLGTQTYICNVNHKPSNTKVDKKVEPKSC

SEQ ID NO: 4392 - protein, 629 aa, synthetic construct; identical to SEQ ID NO: 4334

SEQ ID NO: 4393 - protein, 267 aa, synthetic construct; identical to SEQ ID NO: 4389

SEQ ID NO: 4394 - protein, 629 aa, synthetic construct; identical to SEQ ID NO: 4334

SEQ ID NO: 4395 - protein, 267 aa, synthetic construct; identical to SEQ ID NO: 4391

SEQ ID NO: 4396 - protein, 638 aa, synthetic construct; identical to SEQ ID NO: 163

SEQ ID NO: 4397 - protein, 267 aa, synthetic construct; identical to SEQ ID NO: 4389

SEQ ID NO: 4398 - protein, 638 aa, synthetic construct; identical to SEQ ID NO: 163

SEQ ID NO: 4399 - protein, 267 aa, synthetic construct; identical to SEQ ID NO: 4391

SEQ ID NO: 4400 - protein, 629 aa, synthetic construct; identical to SEQ ID NO: 4350

SEQ ID NO: 4401 - protein, 267 aa, synthetic construct; identical to SEQ ID NO: 4389

SEQ ID NO: 4402 - protein, 629 aa, synthetic construct; identical to SEQ ID NO: 4350

SEQ ID NO: 4403 - protein, 267 aa, synthetic construct; identical to SEQ ID NO: 4391

SEQ ID NO: 4404 - protein, 638 aa, synthetic construct; identical to SEQ ID NO: 159

SEQ ID NO: 4405 - protein, 267 aa, synthetic construct
GGEDILCKPKWMCEGFGGGSGGLSGRSDAGSPLGLAGSGGSQVQLVESGGGVVQPGRSLRLSCAASGFAFSRYGMHWVRQAPGKGLEWVAVIWYDGSNKYYADSVKGRFTISRDNSKNTQYLQMNSLRAEDTAVYYCARGGDFLYYYYYGMDVWGQGTTVTVSSASTKGPSVFPLAPSSKSTSGGTAALGCLVKDYFPEPVTVSWNSGALTSGVHTFPAVLQSSGLYSLSSVVTVPSSSLGTQTYICNVNHKPSNTKVDKKVEPKSC

SEQ ID NO: 4406 - protein, 638 aa, synthetic construct; identical to SEQ ID NO: 159

SEQ ID NO: 4407 - protein, 267 aa, synthetic construct
GGEDILCKPKWMCEGFGGGSGGLSGRSDAGSPLGLAGSGGSQVQLVESGGGVVQPGRSLSLSCAASGFAFSRYGMHWVRQAPGKGLEWVAVIWYDGSNKYYADSVKGRFTISRDNSKNTQYLQMNSLRAEDTAVYYCARGGDFLYYYYYGMDVWGQGTTVTVSSASTKGPSVFPLAPSSKSTSGGTAALGCLVKDYFPEPVTVSWNSGALTSGVHTFPAVLQSSGLYSLSSVVTVPSSSLGTQTYICNVNHKPSNTKVDKKVEPKSC

SEQ ID NO: 4408 - protein, 629 aa, synthetic construct; identical to SEQ ID NO: 4334

SEQ ID NO: 4409 - protein, 267 aa, synthetic construct; identical to SEQ ID NO: 4405

SEQ ID NO: 4410 - protein, 629 aa, synthetic construct; identical to SEQ ID NO: 4334

SEQ ID NO: 4411 - protein, 267 aa, synthetic construct; identical to SEQ ID NO: 4407

SEQ ID NO: 4412 - protein, 638 aa, synthetic construct; identical to SEQ ID NO: 163

SEQ ID NO: 4413 - protein, 267 aa, synthetic construct; identical to SEQ ID NO: 4405

SEQ ID NO: 4414 - protein, 638 aa, synthetic construct; identical to SEQ ID NO: 163

SEQ ID NO: 4415 - protein, 267 aa, synthetic construct; identical to SEQ ID NO: 4407

SEQ ID NO: 4416 - protein, 629 aa, synthetic construct; identical to SEQ ID NO: 4350

SEQ ID NO: 4417 - protein, 267 aa, synthetic construct; identical to SEQ ID NO: 4405

SEQ ID NO: 4418 - protein, 629 aa, synthetic construct; identical to SEQ ID NO: 4350

SEQ ID NO: 4419 - protein, 267 aa, synthetic construct; identical to SEQ ID NO: 4407

SEQ ID NO: 4420 - protein, 638 aa, synthetic construct; identical to SEQ ID NO: 159

SEQ ID NO: 4421 - protein, 267 aa, synthetic construct
GGITPVCKPLWMCSGLGGGSGGLSGRSDAGSPLGLAGSGGSQVQLVESGGGVVQPGRSLRLSCAASGFAFSRYGMHWVRQAPGKGLEWVAVIWYDGSNKYYADSVKGRFTISRDNSKNTQYLQMNSLRAEDTAVYYCARGGDFLYYYYYGMDVWGQGTTVTVSSASTKGPSVFPLAPSSKSTSGGTAALGCLVKDYFPEPVTVSWNSGALTSGVHTFPAVLQSSGLYSLSSVVTVPSSSLGTQTYICNVNHKPSNTKVDKKVEPKSC

SEQ ID NO: 4422 - protein, 638 aa, synthetic construct; identical to SEQ ID NO: 159

SEQ ID NO: 4423 - protein, 267 aa, synthetic construct
GGITPVCKPLWMCSGLGGGSGGLSGRSDAGSPLGLAGSGGSQVQLVESGGGVVQPGRSLSLSCAASGFAFSRYGMHWVRQAPGKGLEWVAVIWYDGSNKYYADSVKGRFTISRDNSKNTQYLQMNSLRAEDTAVYYCARGGDFLYYYYYGMDVWGQGTTVTVSSASTKGPSVFPLAPSSKSTSGGTAALGCLVKDYFPEPVTVSWNSGALTSGVHTFPAVLQSSGLYSLSSVVTVPSSSLGTQTYICNVNHKPSNTKVDKKVEPKSC

SEQ ID NO: 4424 - protein, 629 aa, synthetic construct; identical to SEQ ID NO: 4334

SEQ ID NO: 4425 - protein, 267 aa, synthetic construct; identical to SEQ ID NO: 4421

SEQ ID NO: 4426 - protein, 629 aa, synthetic construct; identical to SEQ ID NO: 4334

SEQ ID NO: 4427 - protein, 267 aa, synthetic construct; identical to SEQ ID NO: 4423

SEQ ID NO: 4428 - protein, 638 aa, synthetic construct; identical to SEQ ID NO: 163

SEQ ID NO: 4429 - protein, 267 aa, synthetic construct; identical to SEQ ID NO: 4421

SEQ ID NO: 4430 - protein, 638 aa, synthetic construct; identical to SEQ ID NO: 163

SEQ ID NO: 4431 - protein, 267 aa, synthetic construct; identical to SEQ ID NO: 4423

SEQ ID NO: 4432 - protein, 629 aa, synthetic construct; identical to SEQ ID NO: 4350

SEQ ID NO: 4433 - protein, 267 aa, synthetic construct; identical to SEQ ID NO: 4421

SEQ ID NO: 4434 - protein, 629 aa, synthetic construct; identical to SEQ ID NO: 4350

SEQ ID NO: 4435 - protein, 267 aa, synthetic construct; identical to SEQ ID NO: 4423

SEQ ID NO: 4436 - protein, 638 aa, synthetic construct
EVQLVESGGGLVQPGGSLRLSCAASGSTFYTAVMGWVRQAPGKGLEWVAAIRWTALTTSYADSVKGRFTISRDGAKTTLYLQMNSLRPEDTAVYYCAARGTLGLFTTADSYDYWGQGTLVTVSSGGGGSGGGSGGYCEGHLPEYLAKCLGSSGGSGGLSGRSDAGSPLGLAGSGGGSQVQLVQSGAEVKKPGASVKVSCKASGYTFTSYYIHWVRQAPGQGLEWIGSIYPGNVNTNYNEKFKDRATLTVDTSISTAYMELSRLRSDDTAVYFCTRSHYGLDWNFDVWGQGTTVTVSSGGGGSGGGGSGGGGSDIQMTQSPSSLSASVGDRVTITCHASQNIYVWLNWYQQKPGKAPKLLIYKASNLHTGVPSRFSGSGSGTDFTLTISSLQPEDFATYYCQQGQTYPYTFGGGTKVEIKGGGGSDIQMTQSPSSLSASVGDRVTITCRASQGISNYLAWYQQKTGKVPKFLIYEASTLQSGVPSRFSGGGSGTDFTLTISSLQPEDVATYYCQNYNSAPFTFGPGTKVDIKRTVAAPSVFIFPPSDEQLKSGTASVVCLLNNFYPREAKVQWKVDNALQSGNSQESVTEQDSKDSTYSLSSTLTLSKADYEKHKVYACEVTHQGLSSPVTKSFNRGEC

SEQ ID NO: 4437 - protein, 226 aa, synthetic construct; identical to SEQ ID NO: 20

SEQ ID NO: 4438 - protein, 638 aa, synthetic construct; identical to SEQ ID NO: 4436

SEQ ID NO: 4439 - protein, 267 aa, synthetic construct; identical to SEQ ID NO: 4421

SEQ ID NO: 4440 - protein, 638 aa, synthetic construct
EVQLVESGGGLVQPGGSLRLSCAASGSTFYTAVMGWVRQAPGKGLEWVAAIRWTALTTSYADSVKGRFTISRDGAKTTLYLQMNSLRPEDTAVYYCAARGTLGLFTTADSYDYWGQGTLVTVSSGGGGSGGGSGGYCEGHLPEYLAKCLGSSGGSGGLSGRSDAGSPLGLAGSGGGSQVQLVQSGAEVKKPGASVKVSCKASGYTFTSYYIHWVRQAPGQCLEWIGSIYPGNVNTNYNEKFKDRATLTVDTSISTAYMELSRLRSDDTAVYFCTRSHYGLDWNFDVWGQGTTVTVSSGGGGSGGGGSGGGGSDIQMTQSPSSLSASVGDRVTITCHASQNIYVWLNWYQQKPGKAPKLLIYKASNLHTGVPSRFSGSGSGTDFTLTISSLQPEDFATYYCQQGQTYPYTFGCGTKVEIKGGGGSDIQMTQSPSSLSASVGDRVTITCRASQGISNYLAWYQQKTGKVPKFLIYEASTLQSGVPSRFSGGGSGTDFTLTISSLQPEDVATYYCQNYNSAPFTFGPGTKVDIKRTVAAPSVFIFPPSDEQLKSGTASVVCLLNNFYPREAKVQWKVDNALQSGNSQESVTEQDSKDSTYSLSSTLTLSKADYEKHKVYACEVTHQGLSSPVTKSFNRGEC

SEQ ID NO: 4441 - protein, 267 aa, synthetic construct; identical to SEQ ID NO: 4421

SEQ ID NO: 4442 - protein, 638 aa, synthetic construct
EVQLVESGGGLVQPGGSLRLSCAASGSTFYTAVMGWVRQAPGKGLEWVAAIRWTALTTSYADSVKGRFTISRDGAKTTLYLQMNSLRPEDTAVYYCAARGTLGLFTTADSYDYWGQGTLVTVSSGGGGSGGGSGGYCEGHLPEYLAKCLGSSGGSGGLSGRSDAGSPLGLAGSGGGSDIQMTQSPSSLSASVGDRVTITCHASQNIYVWLNWYQQKPGKAPKLLIYKASNLHTGVPSRFSGSGSGTDFTLTISSLQPEDFATYYCQQGQTYPYTFGGGTKVEIKGGGGSGGGGSGGGGSQVQLVQSGAEVKKPGASVKVSCKASGYTFTSYYIHWVRQAPGQGLEWIGSIYPGNVNTNYNEKFKDRATLTVDTSISTAYMELSRLRSDDTAVYFCTRSHYGLDWNFDVWGQGTTVTVSSGGGGSDIQMTQSPSSLSASVGDRVTITCRASQGISNYLAWYQQKTGKVPKFLIYEASTLQSGVPSRFSGGGSGTDFTLTISSLQPEDVATYYCQNYNSAPFTFGPGTKVDIKRTVAAPSVFIFPPSDEQLKSGTASVVCLLNNFYPREAKVQWKVDNALQSGNSQESVTEQDSKDSTYSLSSTLTLSKADYEKHKVYACEVTHQGLSSPVTKSFNRGEC

SEQ ID NO: 4443 - protein, 226 aa, synthetic construct; identical to SEQ ID NO: 20

SEQ ID NO: 4444 - protein, 638 aa, synthetic construct; identical to SEQ ID NO: 4442

SEQ ID NO: 4445 - protein, 267 aa, synthetic construct; identical to SEQ ID NO: 4421

SEQ ID NO: 4446 - protein, 638 aa, synthetic construct
EVQLVESGGGLVQPGGSLRLSCAASGSTFYTAVMGWVRQAPGKGLEWVAAIRWTALTTSYADSVKGRFTISRDGAKTTLYLQMNSLRPEDTAVYYCAARGTLGLFTTADSYDYWGQGTLVTVSSGGGGSGGGSGGYCEGHLPEYLAKCLGSSGGSGGLSGRSDAGSPLGLAGSGGGSDIQMTQSPSSLSASVGDRVTITCHASQNIYVWLNWYQQKPGKAPKLLIYKASNLHTGVPSRFSGSGSGTDFTLTISSLQPEDFATYYCQQGQTYPYTFGCGTKVEIKGGGGSGGGGSGGGGSQVQLVQSGAEVKKPGASVKVSCKASGYTFTSYYIHWVRQAPGQCLEWIGSIYPGNVNTNYNEKFKDRATLTVDTSISTAYMELSRLRSDDTAVYFCTRSHYGLDWNFDVWGQGTTVTVSSGGGGSDIQMTQSPSSLSASVGDRVTITCRASQGISNYLAWYQQKTGKVPKFLIYEASTLQSGVPSRFSGGGSGTDFTLTISSLQPEDVATYYCQNYNSAPFTFGPGTKVDIKRTVAAPSVFIFPPSDEQLKSGTASVVCLLNNFYPREAKVQWKVDNALQSGNSQESVTEQDSKDSTYSLSSTLTLSKADYEKHKVYACEVTHQGLSSPVTKSFNRGEC

SEQ ID NO: 4447 - protein, 267 aa, synthetic construct; identical to SEQ ID NO: 4421

SEQ ID NO: 4448 - protein, 115 aa, synthetic construct [sequence omitted]

SEQ ID NO: 4449 - protein, 14 aa, synthetic construct
  SITE 1: note = Methionine sulfoxide
MDWCPRDLWVHCFA

SEQ ID NO: 4450 - protein, 14 aa, synthetic construct
  SITE 1: note = Methionine sulfone
MDWCPRDLWVHCFA

SEQ ID NO: 4451 - protein, 14 aa, synthetic construct
MDWCPRERWVDCFF

SEQ ID NO: 4452 - protein, 256 aa, synthetic construct
GGVDFCKIYSWPVCHQGGGGSGGLSGRSDAGSPLGLAGSGGSDIQLTQSPSSLSASVGDRVSITCKASQDVSIAVAWYQQKPGKAPKLLIYSASYRYTGVPDRFSGSGSGTDFTLTISSLQPEDFAVYYCQQHYITPLTFGAGTKVEIKRTVAAPSVFIFPPSDEQLKSGTASVVCLLNNFYPREAKVQWKVDNALQSGNSQESVTEQDSKDSTYSLSSTLTLSKADYEKHKVYACEVTHQGLSSPVTKSFNRGEC

SEQ ID NO: 4453 - protein, 655 aa, synthetic construct
EVQLVESGGGLVQPGGSLRLSCAASGSTFYTAVMGWVRQAPGKGLEWVAAIRWTALTTSYADSVKGRFTISRDGAKTTLYLQMNSLRPEDTAVYYCAARGTLGLFTTADSYDYWGQGTLVTVSSGGGGSGGGSGGVYCGPEFDESVGCMGGGGSGGGLSGRSDAGSPLGLAGSGGGSEVQLVESGGGLVQPGGSLKLSCAASGFTFNKYAMNWVRQAPGKGLEWVARIRSKYNNYATYYADSVKDRFTISRDDSKNTAYLQMNNLKTEDTAVYYCVRHGNFGNSYISYWAYWGQGTLVTVSSGGGGSGGGGSGGGGSQTVVTQEPSLTVSPGGTVTLTCGSSTGAVTSGNYPNWVQQKPGQAPRGLIGGTKFLAPGTPARFSGSLLGGKAALTLSGVQPEDEAEYYCVLWYSNRWVFGGGTKLTVLGGGGSQVQLQQSGSELKKPGASVKVSCKASGYTFTNYGMNWVKQAPGQGLKWMGWINTYTGEPTYTDDFKGRFAFSLDTSVSTAYLQISSLKADDTAVYFCARGGFGSSYWYFDVWGQGSLVTVSSASTKGPSVFPLAPSSKSTSGGTAALGCLVKDYFPEPVTVSWNSGALTSGVHTFPAVLQSSGLYSLSSVVTVPSSSLGTQTYICNVNHKPSNTKVDKKVEPKSC

SEQ ID NO: 4454 - protein, 261 aa, synthetic construct
GGIDFCMLYNWPICAGGGGGSSGGSAAGLLAPPGGLSGRSDAGGGGSDIQLTQSPSSLSASVGDRVSITCKASQDVSIAVAWYQQKPGKAPKLLIYSASYRYTGVPDRFSGSGSGTDFTLTISSLQPEDFAVYYCQQHYITPLTFGAGTKVEIKRTVAAPSVFIFPPSDEQLKSGTASVVCLLNNFYPREAKVQWKVDNALQSGNSQESVTEQDSKDSTYSLSSTLTLSKADYEKHKVYACEVTHQGLSSPVTKSFNRGEC

SEQ ID NO: 4455 - protein, 655 aa, synthetic construct
EVQLVESGGGLVQPGGSLRLSCAASGSTFYTAVMGWVRQAPGKGLEWVAAIRWTALTTSYADSVKGRFTISRDGAKTTLYLQMNSLRPEDTAVYYCAARGTLGLFTTADSYDYWGQGTLVTVSSGGGGSGGGSGGVYCGPEFDESVGCMGSSGGSAAGLLAPPGGLSGRSDAGGGGSEVQLVESGGGLVQPGGSLKLSCAASGFTFNKYAMNWVRQAPGKGLEWVARIRSKYNNYATYYADSVKDRFTISRDDSKNTAYLQMNNLKTEDTAVYYCVRHGNFGNSYISYWAYWGQGTLVTVSSGGGGSGGGGSGGGGSQTVVTQEPSLTVSPGGTVTLTCGSSTGAVTSGNYPNWVQQKPGQAPRGLIGGTKFLAPGTPARFSGSLLGGKAALTLSGVQPEDEAEYYCVLWYSNRWVFGGGTKLTVLGGGGSQVQLQQSGSELKKPGASVKVSCKASGYTFTNYGMNWVKQAPGQGLKWMGWINTYTGEPTYTDDFKGRFAFSLDTSVSTAYLQISSLKADDTAVYFCARGGFGSSYWYFDVWGQGSLVTVSSASTKGPSVFPLAPSSKSTSGGTAALGCLVKDYFPEPVTVSWNSGALTSGVHTFPAVLQSSGLYSLSSVVTVPSSSLGTQTYICNVNHKPSNTKVDKKVEPKSC

SEQ ID NO: 4456 - protein, 261 aa, synthetic construct
GGVDFCKIYSWPVCHQGGGGSSGGSAAGLLAPPGGLSGRSDAGGGGSDIQLTQSPSSLSASVGDRVSITCKASQDVSIAVAWYQQKPGKAPKLLIYSASYRYTGVPDRFSGSGSGTDFTLTISSLQPEDFAVYYCQQHYITPLTFGAGTKVEIKRTVAAPSVFIFPPSDEQLKSGTASVVCLLNNFYPREAKVQWKVDNALQSGNSQESVTEQDSKDSTYSLSSTLTLSKADYEKHKVYACEVTHQGLSSPVTKSFNRGEC

SEQ ID NO: 4457 - protein, 655 aa, synthetic construct; identical to SEQ ID NO: 4455

SEQ ID NO: 4458 - protein, 645 aa, synthetic construct
EVQLVESGGGLVQPGGSLRLSCAASGSTFYTAVMGWVRQAPGKGLEWVAAIRWTALTTSYADSVKGRFTISRDGAKTTLYLQMNSLRPEDTAVYYCAARGTLGLFTTADSYDYWGQGTLVTVSSGGGGSGGGSGGVYCGPEFDESVGCMGSSGGSAAGLLAPPGGLSGRSDAGGGGSEVQLVESGGGLVQPGGSLKLSCAASGFTFNKYAMNWVRQAPGKGLEWVARIRSKYNNYATYYADSVKDRFTISRDDSKNTAYLQMNNLKTEDTAVYYCVRHGNFGNSYISYWAYWGQGTLVTVSSGGGGSGGGGSGGGGSQTVVTQEPSLTVSPGGTVTLTCGSSTGAVTSGNYPNWVQQKPGQAPRGLIGGTKFLAPGTPARFSGSLLGGKAALTLSGVQPEDEAEYYCVLWYSNRWVFGGGTKLTVLGGGGSDIQLTQSPSSLSASVGDRVSITCKASQDVSIAVAWYQQKPGKAPKLLIYSASYRYTGVPDRFSGSGSGTDFTLTISSLQPEDFAVYYCQQHYITPLTFGAGTKVEIKRTVAAPSVFIFPPSDEQLKSGTASVVCLLNNFYPREAKVQWKVDNALQSGNSQESVTEQDSKDSTYSLSSTLTLSKADYEKHKVYACEVTHQGLSSPVTKSFNRGEC

SEQ ID NO: 4459 - protein, 271 aa, synthetic construct
GGIDFCMLYNWPICAGGGGGSSGGSAAGLLAPPGGLSGRSDAGGGGSQVQLQQSGSELKKPGASVKVSCKASGYTFTNYGMNWVKQAPGQGLKWMGWINTYTGEPTYTDDFKGRFAFSLDTSVSTAYLQISSLKADDTAVYFCARGGFGSSYWYFDVWGQGSLVTVSSASTKGPSVFPLAPSSKSTSGGTAALGCLVKDYFPEPVTVSWNSGALTSGVHTFPAVLQSSGLYSLSSVVTVPSSSLGTQTYICNVNHKPSNTKVDKKVEPKSC

SEQ ID NO: 4460 - protein, 256 aa, synthetic construct
GGIDFCMLYNWPICAGGGGGSGGLSGRSDAGSPLGLAGSGGSDIQLTQSPSSLSASVGDRVSITCKASQDVSIAVAWYQQKPGKAPKLLIYSASYRYTGVPDRFSGSGSGTDFTLTISSLQPEDFAVYYCQQHYITPLTFGAGTKVEIKRTVAAPSVFIFPPSDEQLKSGTASVVCLLNNFYPREAKVQWKVDNALQSGNSQESVTEQDSKDSTYSLSSTLTLSKADYEKHKVYACEVTHQGLSSPVTKSFNRGEC

SEQ ID NO: 4461 - protein, 655 aa, synthetic construct; identical to SEQ ID NO: 4453

SEQ ID NO: 4462 - protein, 256 aa, synthetic construct; identical to SEQ ID NO: 679

SEQ ID NO: 4463 - protein, 655 aa, synthetic construct; identical to SEQ ID NO: 4453

SEQ ID NO: 4464 - protein, 645 aa, synthetic construct
EVQLVESGGGLVQPGGSLRLSCAASGSTFYTAVMGWVRQAPGKGLEWVAAIRWTALTTSYADSVKGRFTISRDGAKTTLYLQMNSLRPEDTAVYYCAARGTLGLFTTADSYDYWGQGTLVTVSSGGGGSGGGSGGVYCGPEFDESVGCMGGGGSGGGLSGRSDAGSPLGLAGSGGGSEVQLVESGGGLVQPGGSLKLSCAASGFTFNKYAMNWVRQAPGKGLEWVARIRSKYNNYATYYADSVKDRFTISRDDSKNTAYLQMNNLKTEDTAVYYCVRHGNFGNSYISYWAYWGQGTLVTVSSGGGGSGGGGSGGGGSQTVVTQEPSLTVSPGGTVTLTCGSSTGAVTSGNYPNWVQQKPGQAPRGLIGGTKFLAPGTPARFSGSLLGGKAALTLSGVQPEDEAEYYCVLWYSNRWVFGGGTKLTVLGGGGSDIQLTQSPSSLSASVGDRVSITCKASQDVSIAVAWYQQKPGKAPKLLIYSASYRYTGVPDRFSGSGSGTDFTLTISSLQPEDFAVYYCQQHYITPLTFGAGTKVEIKRTVAAPSVFIFPPSDEQLKSGTASVVCLLNNFYPREAKVQWKVDNALQSGNSQESVTEQDSKDSTYSLSSTLTLSKADYEKHKVYACEVTHQGLSSPVTKSFNRGEC

SEQ ID NO: 4465 - protein, 266 aa, synthetic construct
GGVDFCGLYHWPICYQGGGGSGGLSGRSDAGSPLGLAGSGGSQVQLQQSGSELKKPGASVKVSCKASGYTFTNYGMNWVKQAPGQGLKWMGWINTYTGEPTYTDDFKGRFAFSLDTSVSTAYLQISSLKADDTAVYFCARGGFGSSYWYFDVWGQGSLVTVSSASTKGPSVFPLAPSSKSTSGGTAALGCLVKDYFPEPVTVSWNSGALTSGVHTFPAVLQSSGLYSLSSVVTVPSSSLGTQTYICNVNHKPSNTKVDKKVEPKSC

SEQ ID NO: 4466 - protein, 473 aa, synthetic construct
QVQLVQSGAEVKKPGASVKVSCKASGYTFTSYYIHWVRQAPGQGLEWIGSIYPGNVNTNYNEKFKDRATLTVDTSISTAYMELSRLRSDDTAVYFCTRSHYGLDWNFDVWGQGTTVTVSSGGGGSGGGGSGGGGSDIQMTQSPSSLSASVGDRVTITCHASQNIYVWLNWYQQKPGKAPKLLIYKASNLHTGVPSRFSGSGSGTDFTLTISSLQPEDFATYYCQQGQTYPYTFGGGTKVEIKGGGGSQVQLVQSGAEVKKPGSSVKVSCKTSGDTFSTYAISWVRQAPGQGLEWMGGIIPIFGKAHYAQKFQGRVTITADESTSTAYMELSSLRSEDTAVYFCARKFHFVSGSPFGMDVWGQGTTVTVSSASTKGPSVFPLAPSSKSTSGGTAALGCLVKDYFPEPVTVSWNSGALTSGVHTFPAVLQSSGLYSLSSVVTVPSSSLGTQTYICNVNHKPSNTKVDKKVEPKSC

SEQ ID NO: 4467 - protein, 213 aa, synthetic construct
EIVLTQSPATLSLSPGERATLSCRASQSVSSYLAWYQQKPGQAPRLLIYDASNRATGIPARFSGSGSGTDFTLTISSLEPEDFAVYYCQQRSNWPTFGQGTKVEIKRTVAAPSVFIFPPSDEQLKSGTASVVCLLNNFYPREAKVQWKVDNALQSGNSQESVTEQDSKDSTYSLSSTLTLSKADYEKHKVYACEVTHQGLSSPVTKSFNRGEC

SEQ ID NO: 4468 - protein, 213 aa, synthetic construct; identical to SEQ ID NO: 4467

SEQ ID NO: 4469 - protein, 473 aa, synthetic construct
QVQLVQSGAEVKKPGASVKVSCKASGYTFTSYYIHWVRQAPGQCLEWIGSIYPGNVNTNYNEKFKDRATLTVDTSISTAYMELSRLRSDDTAVYFCTRSHYGLDWNFDVWGQGTTVTVSSGGGGSGGGGSGGGGSDIQMTQSPSSLSASVGDRVTITCHASQNIYVWLNWYQQKPGKAPKLLIYKASNLHTGVPSRFSGSGSGTDFTLTISSLQPEDFATYYCQQGQTYPYTFGCGTKVEIKGGGGSQVQLVQSGAEVKKPGSSVKVSCKTSGDTFSTYAISWVRQAPGQGLEWMGGIIPIFGKAHYAQKFQGRVTITADESTSTAYMELSSLRSEDTAVYFCARKFHFVSGSPFGMDVWGQGTTVTVSSASTKGPSVFPLAPSSKSTSGGTAALGCLVKDYFPEPVTVSWNSGALTSGVHTFPAVLQSSGLYSLSSVVTVPSSSLGTQTYICNVNHKPSNTKVDKKVEPKSC

SEQ ID NO: 4470 - protein, 14 aa, synthetic construct
  VARIANT 1: note = V, E, L, D, I, G, M, S, P, T, A, F, W, Y, Q, H, N, K, or R
  VARIANT 2: note = E, V, D, T, S, L, G, P, A, M, I, Q, H, F, Y, N, W, R, or K
  VARIANT 3: note = K, P, R, I, N, H, V, M, A, L, Q, T, S, G, F, Y, E, W, or D
  VARIANT 4: note = W, L, M, R, V, Y, A, K, I, S, Q, F, H, E, T, N, G, or D
  VARIANT 6: note = I, V, T, K, R, E, S, Q, M, L, F, A, N, or H
  VARIANT 8: note = A, E, S, P, Q, T, L, D, M, V, R, K, N, I, H, W, Y, F, or G
  VARIANT 10: note = M, L, I, A, V, F, G, or K
  VARIANT 12: note = E, S, T, A, V, D, Q, L, N, I, M, Y, H, F, W, G, K, R, or P
  VARIANT 13: note = G, V, A, S, W, E, D, M, T, L, F, H, Q, N, R, I, Y, P, or K
  VARIANT 14: note = F, L, M, S, I, V, D, Q, T, A, N, Y, W, E, R, H, P, G, or K
XXXXCXPXWXCXXX